(19) United States
(12) Patent Application Publication
(10) Pub. No.: US 2024/0175018 A1
(43) Pub. Date: May 30, 2024

(54) OLIGONUCLEOTIDE COMPOSITIONS AND METHODS OF USE THEREOF

(71) Applicant: WAVE LIFE SCIENCES LTD., Singapore (SG)

(72) Inventors: Chandra Vargeese, Schwenksville, PA (US); Naoki Iwamoto, Boston, MA (US); David Charles Donnell Butler, Medford, MA (US); Subramanian Marappan, Acton, MA (US); Genliang Lu, Winchester, MA (US); Jason Jingxin Zhang, Walpole, MA (US); Vinod Vathipadiekal, Stoneham, MA (US); Luciano Henrique Apponi, Everett, MA (US); Hanna Maria Wisniewska, Cambridge, MA (US); Xiayun Cheng, Old Saybrook, CT (US); Young Jin Cho, Belmont, MA (US)

(21) Appl. No.: 18/178,470

(22) Filed: Mar. 3, 2023

Related U.S. Application Data
(63) Continuation of application No. 16/618,001, filed on Nov. 27, 2019, now Pat. No. 11,597,927.
(60) Provisional application No. 62/670,698, filed on May 11, 2018.
(60) Provisional application No. 62/514,769, filed on Jun. 2, 2017.

(51) Int. Cl. C12N 15/113; A61K 45/06; A61K 47/54; A61K 47/55

(52) U.S. Cl. CPC C12N 15/113; A61K 45/06; A61K 47/54; A61K 47/545; A61K 47/548; A61K 47/549; A61K 47/55; C12N 2310/14; C12N 2310/315; C12N 2310/32; C12N 2310/33; C12N 2310/352

(57) ABSTRACT

Among other things, the present disclosure provides designed PNPLA3 oligonucleotides, compositions, and methods thereof. In some embodiments, provided oligonucleotide compositions provide improved single-stranded RNA interference and/or RNase H-mediated knockdown. Among other things, the present disclosure encompasses the recognition that structural elements of oligonucleotides, such as base sequence, chemical modifications (e.g., modifications of sugar, base, and/or internucleotidic linkages) or patterns thereof, conjugation with additional chemical moieties, and/or stereochemistry [e.g., stereochemistry of backbone chiral centers (chiral internucleotidic linkages)], and/or patterns thereof, can have significant impact on oligonucleotide properties and activities, e.g., RNA interference (RNAi) activity, stability, delivery, etc. In some embodiments, the present disclosure provides methods for treatment of diseases using provided oligonucleotide compositions, for example, in RNA interference and/or RNase H-mediated knockdown.

### CROSS-REFERENCE TO RELATED APPLICATIONS

[0001] This application is a continuation of U.S. application Ser. No. 16/618,001, filed Nov. 27, 2019, which issued as U.S. Pat. No. 11,597,927 on Mar. 7, 2023, which is a National Stage Entry of International Application No. PCT/US18/35721, filed Jun. 1, 2018, which claims priority to United States Provisional Application Nos. 62/514,769, filed Jun. 2, 2017, and 62/670,698, filed May 11, 2018, the entirety of each of which is incorporated herein by reference.

### SEQUENCE LISTING

[0002] The instant application contains a Sequence Listing which has been submitted electronically in XML format and is hereby incorporated by reference in its entirety. Said XML copy, created on Aug. 2, 2019, is named “SL.xml” and is 2,777,642 bytes in size.

### BACKGROUND

[0003] Oligonucleotides which target PNPLA3 (PNPLA3 oligonucleotides) are useful in various applications, e.g., therapeutic applications. The use of naturally-occurring nucleic acids (e.g., unmodified DNA or RNA) can be limited, for example, by their susceptibility to endo- and exo-nucleases.

### SUMMARY

[0004] Among other things, the present disclosure encompasses the recognition that controlling structural elements of PNPLA3 oligonucleotides, such as chemical modifications (e.g., modifications of a sugar, base and/or internucleotidic linkage) or patterns thereof, alterations in stereochemistry (e.g., stereochemistry of a backbone chiral internucleotidic linkage) or patterns thereof, and/or conjugation with an additional chemical moiety (e.g., a lipid moiety, a targeting moiety, carbohydrate moiety, a moiety that binds to a asialoglycoprotein receptor or ASGPR, e.g., a GaINAc moiety, etc.) can have a significant impact on PNPLA3 oligonucleotide properties and/or activities. In some embodiments, the properties and/or activities include, but are not limited to, participation in, direction of a decrease in expression, activity or level of a PNPLA3 gene or a gene product thereof, mediated, for example, by RNA interference (RNAi interference), single-stranded RNA interference (ssRNAi), RNaseH-mediated knockdown, steric hindrance of translation, etc.

[0005] It is to be understood that both the foregoing general description and the following detailed description are exemplary and explanatory only and are not restrictive of the invention, as claimed.

### DETAILED DESCRIPTION OF THE INVENTION

[0006] The present invention may be understood more readily by reference to the following detailed description of exemplary embodiments of the invention and the examples included therein.

[0007] It is to be understood that this invention is not limited to specific synthetic methods of making that may of course vary. It is also to be understood that the terminology used herein is for the purpose of describing particular embodiments only and is not intended to be limiting.

[0008] In some embodiments, the present disclosure encompasses the recognition that stereochemistry, particularly stereochemistry of backbone chiral centers, can unexpectedly improve properties of PNPLA3 oligonucleotides. In contrast to many prior observations that some structural elements that increase stability can also lower activity, for example, RNA interference, the present disclosure demonstrates that control of stereochemistry can, surprisingly, increase stability while not significantly decreasing activity.

[0009] In some embodiments, the present disclosure provides oligonucleotides having certain 5′-end structures.

[0010] In some embodiments, the present disclosure provides 5′-end structures that, when used in accordance with the present disclosure, can provided oligonucleotides with high biological activities, e.g., RNAi activity.

[0011] In some embodiments, the present disclosure encompasses the recognition that various additional chemical moieties, such as lipid moieties and/or carbohydrate moieties, when incorporated into oligonucleotides, can improve one or more PNPLA3 oligonucleotide properties, such as knock down of the PNPLA3 target gene or a gene product thereof. In some embodiments, an additional chemical moiety is optional. In some embodiments, a PNPLA3 oligonucleotide can comprise more than one additional chemical moiety. In some embodiments, a PNPLA3 oligonucleotide can comprise two or more additional chemical moieties, wherein the additional chemical moieties are identical or non-identical, or of the same category (e.g., targeting moiety, carbohydrate moiety, a moiety that binds to ASPGR, lipid moiety, etc.) or not of the same category. In some embodiments, certain additional chemical moieties facilitate delivery of oligonucleotides to desired cells, tissues and/or organs. In some embodiments, certain additional chemical moieties facilitate internalization of oligonucleotides and/or increase oligonucleotide stability.

[0012] In some embodiments, the present disclosure provides PNPLA3 oligonucleotide compositions that achieve allele-specific suppression, wherein transcripts from one allele of a particular target gene is selectively knocked down relative to at least one other allele of the same gene.

[0013] In some embodiments, the present disclosure demonstrates that certain provided structural elements, technologies and/or features are particularly useful for PNPLA3 oligonucleotides that participate in and/or direct RNAi mechanisms (e.g., RNAi agents). Regardless, however, the teachings of the present disclosure are not limited to oligonucleotides that participate in or operate via any particular mechanism. In some embodiments, the present disclosure pertains to any oligonucleotide which operates through any mechanism, and which comprises any sequence, structure or format (or portion thereof) described herein. In some embodiments, the present disclosure provides a PNPLA3 oligonucleotide which operates through any mechanism, and which comprises any sequence, structure or format (or portion thereof) described herein, including, but not limited to, any 5′-end structure; 5′-end region; a first region (including but not limited to, a seed region); a second region (including, but not limited to, a post-seed region); and a 3′-end region (which can be a 3′-terminal dinucleotide and/or a 3′-end cap) an optional additional chemical moiety (including but not limited to a targeting moiety, a carbohydrate moiety, a moiety that binds APGR, and a lipid moiety); stereochemistry or patterns of stereochemistry; modification or pattern of modification; internucleotidic linkage or pattern of internucleotidic linkages; modification of sugar(s) or pattern of modifications of sugars; modification of base(s) or patterns of modifications of bases. In some embodiments, provided oligonucleotides may participate in (e.g., direct) RNAi mechanisms. In some embodiments, provided oligonucleotides may participate in RNase (ribonuclease. H) mechanisms. In some embodiments, provided oligonucleotides may act as translational inhibitors (e.g., may provide steric blocks of translation). In some embodiments, provided oligonucleotides may be therapeutic. In some embodiments, provided oligonucleotides are useful in therapeutic, diagnostic, research and/or nanomaterials applications. In some embodiments, a target is a specific allele with respect to which expression and/or activity of one or more products (e.g., RNA and/or protein products) are intended to be altered. In many embodiments, a target allele is one whose presence and/or expression is associated (e.g., correlated) with presence, incidence, and/or severity, of one or more diseases and/or conditions. Alternatively or additionally, in some embodiments, a target allele is one for which alteration of level and/or activity of one or more gene products correlates with improvement (e.g., delay of onset, reduction of severity, responsiveness to other therapy, etc) in one or more aspects of a disease and/or condition.

[0014] In some embodiments, where presence and/or activity of a particular allele (a disease-associated allele) is associated (e.g., correlated) with presence, incidence and/or severity of one or more disorders, diseases and/or conditions, a different allele of the same gene exists and is not so associated, or is associated to a lesser extent (e.g., shows less significant, or statistically insignificant correlation). In some such embodiments, oligonucleotides and methods thereof as described herein may preferentially or specifically target the associated allele relative to the one or more less-associated/unassociated allele(s), thus mediating allele-specific suppression.

[0015] In some embodiments, a PNPLA3 target sequence is a sequence to which a PNPLA3 oligonucleotide as described herein binds. In many embodiments, a target sequence is identical to, or is an exact complement of, a sequence of a provided oligonucleotide, or of consecutive residues therein (e.g., a provided oligonucleotide includes a target-binding sequence that is identical to, or an exact complement of, a target sequence). In some embodiments, a target-binding sequence is an exact complement of a target sequence of a transcript (e.g., pre-mRNA, mRNA, etc.). A target-binding sequence/target sequence can be of various lengths to provided oligonucleotides with desired activities and/or properties. In some embodiments, a target binding sequence/target sequence comprises 5-50 bases. In some embodiments, a small number of differences/mismatches is tolerated between (a relevant portion of) an PNPLA3 oligonucleotide and its target sequence, including but not limited to the 5′ and/or 3″-end regions of the target and/or oligonucleotide sequence. In many embodiments, a target sequence is present within a transcript (e.g., an mRNA and/or a pre-mRNA) produced from a target gene.

[0016] In some embodiments, a target sequence includes one or more allelic sites (i.e., positions within a target gene at which allelic variation occurs). In some embodiments, an allelic site is a mutation. In some embodiments, an allelic site is a SNP. In some such embodiments, a provided oligonucleotide binds to one allele preferentially or specifically relative to one or more other alleles. In some embodiments, a provided oligonucleotide binds preferentially to a disease-associated allele. For example, in some embodiments, a PNPLA3 oligonucleotide (or a target-binding sequence portion thereof) provided herein has a sequence that is, at least in part, identical to, or an exact complement of a particular allelic version of a target sequence.

[0017] Unless otherwise noted, all sequences (including, but not limited to base sequences and patterns of chemistry, modification, and/or stereochemistry) are presented in 5′ to 3′ order.

[0018] In some embodiments, the present disclosure provides compositions and methods related to a PNPLA3 oligonucleotide which is specific to a target and which has or comprises the base sequence of any oligonucleotide disclosed herein, or a region of at least 15 contiguous nucleotides of the base sequence of any oligonucleotide disclosed herein, wherein the first nucleotide of the base sequence or the first nucleotide of the at least 15 contiguous nucleotides can be optionally replaced by T or DNA T. In some embodiments, the oligonucleotide is capable of directing ssRNAi.

[0019] In some embodiments, the present disclosure provides a PNPLA3 oligonucleotide composition comprising a first plurality of oligonucleotides which have a common base sequence and comprise one or more internucleotidic linkage, sugar, and/or base modifications.

[0020] In some embodiments, a nucleotide is a natural nucleotide. In some embodiments, a nucleotide is a modified nucleotide. In some embodiments, a nucleotide is a nucleotide analog. In some embodiments, a base is a modified base. In some embodiments, a base is protected nucleobase, such as a protected nucleobase used in oligonucleotide synthesis. In some embodiments, a base is a base analog in some embodiments, a sugar is a modified sugar. In some embodiments, a sugar is a sugar analog. In some embodiments, an internucleotidic linkage is a modified internucleotidic linkage. In some embodiments, a nucleotide comprises a base, a sugar, and an internucleotidic linkage, wherein each of the base, the sugar, and the internucleotidic linkage is independently and optionally naturally-occurring or non-naturally occurring. In some embodiments, a nucleoside comprises a base and a sugar, wherein each of the base and the sugar is independently and optionally naturally-occurring or non-naturally occurring. Non-limiting examples of nucleotides include DNA (2-deoxy) and RNA (2′ nucleotides; and those which comprise one or more modifications at the base, sugar and/or internucleotidic linkage. Non-limiting examples of sugars include ribose and deoxyribose; and ribose and deoxyribose with 2′-modifications, including but not limited to 2′-F, LNA, 2′-OMe, and 2′-MOE modifications. In some embodiments, an internucleotidic linkage can have a structure of Formula I as described in the present disclosure. In some embodiments, an internucleotidic linkage is a moiety which does not a comprise a phosphorus but serves to link two natural or non-natural sugars.

[0021] In some embodiments, the present disclosure provides a chirally controlled PNPLA3 oligonucleotide composition that directs a greater decrease of the expression, activity and/or level of a PNPLA3 gene or a gene product thereof, single-stranded RNA interference and/or RNase H-mediated knockdown, when compared to a reference condition, e.g., absence of the composition, or presence of a reference composition (e.g., a stereorandom composition of oligonucleotides having the same base sequence and chemical modifications).

[0022] In some embodiments, an PNPLA3 oligonucleotide composition comprising a plurality of oligonucleotides is stereorandom in that oligonucleotides of the plurality do not share a common stereochemistry at any chiral internucleotidic linkage. In some embodiments, an PNPLA3 oligonucleotide composition comprising a plurality of oligonucleotides is chirally controlled in that oligonucleotides of the plurality share a common stereochemistry at one or more chiral internucleotidic linkages. In some embodiments, an PNPLA3 oligonucleotide composition comprising a first plurality of oligonucleotides which is chirally controlled has a decreased susceptibility to endo- and exo-nucleases relative to an PNPLA3 oligonucleotide composition comprising a first plurality of oligonucleotides which is stereorandom.

[0023] In some embodiments, a composition comprises a multimer of two or more of any: PNPLA3 oligonucleotides of a first plurality and/or oligonucleotides of a second plurality, wherein the oligonucleotides of the first and second plurality can independently direct knockdown of the same or different targets independently via RNA interference and/or RNase H-mediated knockdown.

[0024] In some embodiments, an PNPLA3 oligonucleotide composition comprising a plurality of oligonucleotides (e.g., a first plurality of oligonucleotides) is chirally controlled in that oligonucleotides of the plurality share a common stereochemistry independently at one or more chiral internucleotidic linkages. In some embodiments, oligonucleotides of the plurality share a common stereochemistry configuration at 1, 2, 3, 4, 5, 6, 7, 8, 9, 10, 11, 12, 13, 14, 15, 16, 17, 18, 19, 20, 21, 22, 23, 24, 25, 26, 27, 28, 29, 30, 35, 40, 45, 50 or more chiral internucleotidic linkages, each of which is independently Rp or Sp In some embodiments, oligonucleotides of the plurality share a common stereochemistry configuration at each chiral internucleotidic linkages. In some embodiments, a chiral internucleotidic linkage where a predetermined level of oligonucleotides of a composition share a common stereochemistry configuration (independently Rp or Sp) is referred to as a chirally controlled internucleotidic linkage.

[0025] In some embodiments, at least 5 internucleotidic linkages are chirally controlled; in some embodiments, at least 10 internucleotidic linkages are chirally controlled; in some embodiments, at least 15 internucleotidic linkages are chirally controlled; in some embodiments, each chiral internucleotidic linkage is chirally controlled.

[0026] In some embodiments, the present disclosure provides an PNPLA3 oligonucleotide composition comprising a first plurality of PNPLA3 oligonucleotides which share:
[0027] 1) a common base sequence;
[0028] 2) a common pattern of backbone linkages; and
[0029] 3) a common pattern of backbone chiral centers, which composition is a substantially pure preparation of a single oligonucleotide in that a predetermined level of the oligonucleotides in the composition have the common base sequence and length, the common pattern of backbone linkages, and the common pattern of backbone chiral centers.

[0030] In some embodiments, the common pattern of backbone chiral centers comprises at least one internucleotidic linkage comprising a chirally controlled chiral center.

[0031] In some embodiments, levels of oligonucleotides and/or diastereopurity can be determined by analytical methods, e.g., chromatographic, spectrometric, spectroscopic methods or any combinations thereof.

[0032] Among other things, the present disclosure encompasses the recognition that stereorandom PNPLA3 oligonucleotide preparations contain a plurality of distinct chemical entities that differ from one another, e.g., in the stereochemical structure (or stereochemistry) of individual backbone chiral centers within the oligonucleotide chain. Without control of stereochemistry of backbone chiral centers, stereorandom oligonucleotide preparations provide uncontrolled compositions comprising undetermined levels of oligonucleotide stereoisomers. Even though these stereoisomers may have die same base sequence and/or chemical modifications, they are different chemical entities at least due to their different backbone stereochemistry, and they can have, as demonstrated herein, different properties, e.g., sensitivity to nucleases, activities, distribution, etc. In some embodiments, a particular stereoisomer may be defined, for ex ample, by its base sequence, its length, its pattern of backbone linkages, and its pattern of backbone chiral centers. In some embodiments, the present disclosure demonstrates that improvements in properties and activities achieved through control of stereochemistry within a PNPLA3 oligonucleotide can be comparable to, or even better than those achieved through use of chemical modification.

[0033] In some embodiments, a PNPLA3 oligonucleotide comprises, in 5′ to 3′ order, a 5′-end region, a seed region, a post-seed region, and a 3-end region, optionally further comprising an additional chemical moiety.

[0034] In some embodiments, a 5′-end region is the entire portion of a PNPLA3 oligonucleotide which is 5′ to the seed region. In some embodiments, a 3′-end region is the entire portion of a PNPLA3 oligonucleotide which is 3′ to the post-seed region.

[0035] In some embodiments, a 5′-end structure is a 5′-end group.

[0036] In some embodiments, a 5′-end structure comprises a 5′-end group.

[0037] In some embodiments, a provided oligonucleotide can comprise a 5′-end region, 5′-end structure, 5′-end group, 5′-end nucleoside, or 5′-end nucleotide described herein or known in the art.

[0038] In some embodiments, a 5′-end structure, a 5′-end region, 5′ nucleotide moiety, seed region, post-seed region, 3′-terminal dinucleotide and/or 3′-end cap independently have any structure described herein or known in the art. In some embodiments, any structure for a 5′-end described herein or known in the art and/or any structure for a 5′ nucleotide moiety described herein or known in the art and/or any structure for a seed region described herein or known in the art and/or any structure for a post-seed, region described herein or known in the art and/or any structure for a 3′-terminal dinucleotide described herein or known in the art and/or any structure for a 3′-end cap described herein or known in the art can be combined.

[0039] In some embodiments, a provided oligonucleotide comprises one or more blocks. In some embodiments, a provided oligonucleotide comprise one or more blocks, wherein a block comprises one or more consecutive nucleosides, and/or nucleotides, and/or sugars, or bases, and/or internucleotidic linkages. In some embodiments, a block encompasses an entire seed region or a portion thereof. In some embodiments, a block encompasses an entire post-seed region or a portion thereof.

[0040] In some embodiments, provided oligonucleotides are blockmers.

[0041] In some embodiments, provided oligonucleotide, are altmers comprising alternating blocks. In some embodiments, a blockmer or an altmer can be defined by chemical modifications (including presence or absence), e.g., base modifications, sugar modification, internucleotidic linkage modifications, stereochemistry, etc., or patterns thereof.

[0042] In some embodiments, provided oligonucleotides comprise one or more sugar modifications. In some embodiments, a sugar modification is at the 2′-position. In some embodiments, a sugar modification is selected from: 2′-F, 2′-OMe, and 2′-MOE. 2′-F is also designated 2′ Fluoro. 2′-OMe is also designated 2′-O-Methyl. 2′-MOE is also designated 2′-Methoxyethyl or MOE.

[0043] In some embodiments, an PNPLA3 oligonucleotide comprises only two 2′-F. In some embodiments, a PNPLA3 oligonucleotide comprises only two 2′-F, wherein the two nucleotides are at the 2nd and 14th positions.

[0044] In some embodiments, a PNPLA3 oligonucleotide comprises only two 2′-F, wherein the two nucleotides are at the 2nd and 14th positions, and wherein the first nucleotide is 2′-deoxy.

[0045] In some embodiments, a PNPLA3 oligonucleotide comprises only two 2′-F, wherein the two nucleotides are at the 2nd and 14th positions, and wherein the first nucleotide is 2′-deoxy T.

[0046] In some embodiments, a PNPLA3 oligonucleotide comprises only two 2′-F, wherein the two nucleotides are at the 2nd and 14th positions, and wherein the first nucleotide is 2′-deoxy, and the 5′-end structure is —OH.

[0047] In some embodiments, a PNPLA3 oligonucleotide comprises only two 2′-F, wherein the two nucleotides are at the 2nd and 14th positions, and wherein the first nucleotide is 2′-deoxy T, and the 5′-end structure is —OH.

[0048] In some embodiments herein, in reference to a PNPLA3 oligonucleotide, “first” (e.g., first nucleotide) refers to the 5′ end of the oligonucleotide, and “last” or “end” (e.g., last nucleotide or end nucleotide) refers to the 3′ end.

[0049] In some embodiments, provided oligonucleotides comprise sugars with a particular modification which alternate with sugars with no modification or a different modification. In some embodiments, sugars with a particular modification appear in one or more blocks.

[0050] In some embodiments, provided oligonucleotides comprise one or more blocks comprising sugars with a particular 2′ modification which alternate with sugars which independently have no modification or have a different modification. In some embodiments, provided oligonucleotides comprise one or more blocks comprising sugars with a 2′-F modification which alternate with sugars which independently have no modification or have a different modification. In some embodiments, provided oligonucleotides comprise one or more blocks comprising sugars with a 2′-OMe modification which alternate with sugars which independently have no modification or a different modification. In some embodiments, provided oligonucleotides one or more blocks comprising sugars with a 2′-OMe modification which alternate with sugars with a 2′-F modification.

[0051] In some embodiments, a block of sugars has or comprises a pattern of 2′-modifications of any of: ff, fffm, fffmm, fffmmm, fffmmmm, fffmmmmm, fffmmmmmm, fffmmmmmmmf, fffnmmmmmff, fffmmmmmmffm, fffmmmmmmffmm, fffmmmmmmmffmmmf, fffmmmmmmffmmfm, fffmmmmmmffmmfmf, fffmmmmmmfmmfmfm, fffmmmmmmffmmfmfmf, fffmmmmmmffmmfmfmfm, fffmmmmnmnffmmfmfmfmm, fffmmmmmmffmmfmfmfmmm, ffmmffmm, ffmmmmmmffmmfmfmfmmm, fmfmfmfmfmfmfm, fmfmfmfmfmfmfmf, fmfmfmfmfmfmfmfm, fmfmfmfmfmfmfmfmf, fmfmfmfmfmfmfmfmfm, fmfmfmfmfmfmfmfmfmf, fmfmfmfmfmfmfmfmfmfm, fmfmfmfmfmfmfmfmfmfmm, fmfmfmfmfmfmfmfmfmm, fmfmfmfmfmfmfmfmm, fmfmfmfmfmfmfmm, fmfmfmfmfmfmmm, fmmffmm, fmmmmmmffmmfmfmfrmnm, mff, mffm, mffmf, mffmff, mffmffm, mffmmffmm, mfmfm, mfmfmfmfmfffmfmfmfmmm, mfmfmfmfmfmfmfm, mfmfmfmfmfmfmfmfmfmm, mfmfmfmfmfmfmfmfmfmmm, mfmfmfmfmfmfmfmfmm, mfmfmfmfmfmfmfmm, mfmfmfmfmfmfmm, mfmfmfmfmfmfmmm, mfmfmfmfmfmmm, mfmfmfmfmfmmmfm, mfmfmfmfmfnminmmm, mfmfmfmfmmm, mfmfmfmfmmmfmfm, mfmfmfmfmmmfmmm, mfmfmfmfmmmmmfm, mfmfmfmmmm, mfmfmfmmmfmfmfm, mfmfmfmmmfmffmmm, mfmfmfmmmfmmmfmm, mfmfmfmfmmmmmfmfmm, mfmfmmm, mfmfmmmfmfmfmfm, mfmfmmmfmfmfmmm, mfmfmmmfmfmmmfm, mfmfmmmfmmmfmfm, mfmfmmmmmfmfmfm, mfmmm, mfmmmfmfmfmfmfm, mfmmmfmfmfmfmmm, mfmmmfmfmfmmmfm, mfmmmfmfmmmfmfm, mfmmmfmmmfmfmfm, mfmmmfmnnfmfmfm, mfmmmmmfmfmfmfm, mmffm, mmffmm, mmffmm, mmffmmf, mmnffmmff, mmffmmffm, mmffmmffmm, mmffmmfmfmfmmm, mmm, mmmffmmfmfmfnmmm, mmmfmfmfmfmfmfm, mmmfmfmfmfmfmmm, mmmfmfmfmfmmmfm, mmmfmfmfmmmfmfm, mmmfmfmmmfmfmfm, mmmfmmmfmfmfmfm, mmmmffmmfmfmfmmm, mmm, mmmm, mmmmm, mmmmmffmmfmfmfmmm, mmmmmfmfmfmfmfm, mmmmmm, mmmmmmffmmmfmfmfmmmm, mfmf, mfmf, mfmfmf, fmfm, fmfmfm, fmfmfmf, ddfd, dfdfdfdf dfdfdfdf, fdfd, fdfdfd, fdfdfdfd, dfdfmfmf, dfmfmf, mfdfmf or dfmfdf, wherein m indicates a 2′-OMe, f indicates a 2′-F, and d indicates no substitution at 2′-position. In some embodiments, a seed region and/or post-seed region can comprise a block of sugar modifications.

[0052] In some embodiments, a block is a stereochemistry block. In some embodiments, a block is an Rp block in that each internucleotidic linkage of the block is Rp. In some embodiments, a seed region-block is an Rp block. In some embodiments, a post-seed region-block is an Rp block. In some embodiments, a block is an Sp block in that each internucleotidic linkage of the block is Sp. In some embodiments, a seed region-block is an Sp block. In some embodiments, a post-seed region-block is an Sp block. In some embodiments, provided oligonucleotides comprise both Rp and Sp blocks. In some embodiments, provided oligonucleotides comprise one or more Rp but no Sp blocks. In some embodiments, provided oligonucleotides comprise one or more Sp but no Rp blocks. In some embodiments, provided oligonucleotides comprise one or more PO blocks wherein each internucleotidic linkage of the block is a natural phosphate linkage.

[0053] In some embodiments, a seed region-block is an Sp block wherein each sugar moiety comprises a 2′-F modification. In some embodiments, a seed region-block is an Sp block wherein each of internucleotidic linkage is a modified internucleotidic linkage and each sugar moiety comprises a 2′-F modification. In some embodiments, a seed region-block is an Sp block wherein each of internucleotidic linkage is a phosphorothioate linkage and each sugar moiety comprises a 2′-F modification. In some embodiments, a seed region-block comprises 4 or more nucleoside units. In some embodiments, a nucleoside unit is a nucleoside. In some embodiments, a seed region-block comprises 5 or more nucleoside units. In some embodiments, a seed region-block comprises 6 or more nucleoside units. In some embodiments, a seed region-block comprises 7 or more nucleoside units. In some embodiments, a post-seed region-block is an Sp block wherein each sugar moiety comprises a 2′-F modification. In some embodiments, a post-seedregion-block is an Sp block wherein each of internucleotidic linkage is a modified internucleotidic linkage and each sugar moiety comprises a 2′-F modification. In some embodiments, a post-seedregion-block is an Sp block wherein each of internucleotidic linkage is a phosphorothioate linkage and each sugar moiety comprises a 2′-F modification. In some embodiments, a post-seed region-block comprises 4 or more nucleoside units. In some embodiments, a post-seedregion-block comprises 5 or more nucleoside units. In some embodiments, a post-seed region-block comprises 6 or more nucleoside units. In some embodiments, a post-seed region-block comprises 7 or more nucleoside units. In some embodiments, a seed region and/or post-seed region can comprise a block. In some embodiments, a seed region and/or post-seed region comprises a stereochemistry block.

[0054] In some embodiments, the present disclosure provides an PNPLA3 oligonucleotide composition comprising a first plurality of oligonucleotides which:
[0055] 1) have a common base sequence; and
[0056] 2) comprise one or more modified sugar moieties and modified internucleotidic linkages.

[0057] In some embodiments, the present disclosure provides an PNPLA3 oligonucleotide composition comprising a first plurality of oligonucleotides capable of directing single-stranded RNA interference which:
[0058] 1) have a common base sequence complementary to a target sequence in a transcript; and
[0059] 2) comprise one or more modified sugar moieties and modified internucleotidic linkages.

[0060] In some embodiments, a reference condition is absence of the composition. In some embodiments, a reference condition is presence of a reference composition. Example reference compositions comprising a reference plurality of oligonucleotides are extensively described in this disclosure. In some embodiments, oligonucleotides of the reference plurality have a different structural elements (chemical modifications, stereochemistry, etc.) compared with oligonucleotides of the first plurality in a provided composition. In some embodiments, a provided oligonucleotide composition comprising a first plurality of oligonucleotide is chirally controlled in that the first plurality of oligonucleotides comprise one or more chirally controlled internucleotidic linkages. In some embodiments, a provided oligonucleotide composition comprising a first plurality of oligonucleotide is chirally controlled in that the first plurality of oligonucleotides comprise 1-20 chirally controlled internucleotidic linkages. In some embodiments, the first plurality of oligonucleotides comprise 2, 34, 5, 6, 7, 8, 9, 10, 11, 12, 13, 14, or 15 chirally controlled internucleotidic linkages. In some embodiments, a reference composition is a stereorandom preparation of oligonucleotides having the same chemical modifications. In some embodiments, a reference composition is a mixture of stereoisomers while a provided composition is a single-stranded RNAi agent of one stereoisomer. In some embodiments, oligonucleotides of the reference plurality have the same base sequence as oligonucleotide of the first plurality in a provided composition. In some embodiments, oligonucleotides of the reference plurality have the same chemical modifications as oligonucleotide of the first plurality in a provided composition. In some embodiments, oligonucleotides of the reference plurality have the same sugar modifications as oligonucleotide of the first plurality in a provided composition. In some embodiments, oligonucleotides of the reference plurality have the same base modifications as oligonucleotide of the first plurality in a provided composition. In some embodiments, oligonucleotides of the reference plurality have the same internucleotidic linkage modifications as oligonucleotide of the first plurality in a provided composition. In some embodiments, oligonucleotides of the reference plurality have the same base sequence and the same chemical modifications as oligonucleotide of the first plurality in a provided composition. In some embodiments, oligonucleotides of the reference plurality have the same stereochemistry as oligonucleotide of the first plurality in a provided composition but different chemical modifications, e.g., base modification, sugar modification, internucleotidic linkage modifications, etc.

[0061] In some embodiments, the present disclosure provides a composition comprising an PNPLA3 oligonucleotide, wherein the oligonucleotideis complementary or substantially complementtay to a target RNA sequence, has alength of about 15 to about 49 totalnucleotides, whereinthe oligonucleotide comprises at least onenon-natural base, sugar and/orinternucleotidic linkage.

[0062] In some embodiments, the present disclosure provides a PNPLA3 oligonucleotide composition comprising a single-stranded RNAi agent, wherein the single-stranded RNAi agent is complementar or substantially complementar to atarget RNA sequence, has alength of about 15 to about 49 total nucleotides, and is capable of directing target-specific RNA interference, wherein the single-stranded RNAi agent comprises at least one non-natural base, sugar and/or internucleotidic linkage.

[0063] In some embodiments, the length is 15 to 49, about 17 to about 49, 17 to 49, about 19 to about 29, 19 to 29, about 19 to about 25, 19 to 25, about 19 to about 23, or 19 to 23 total nucleotides.

[0064] In some embodiments, the present disclosure provides a PNPLA3 oligonucleotide composition comprising a first plurality of oligonucleotides which:
[0065] 1) have a common base sequence complementary or substantially complementary to a target sequence in a transcript; and
[0066] 2) comprise one or more modified sugar moieties and modified internucleotidic linkages, the oligonucleotide composition being characterized in that, when it is contacted with the transcript, knockdown of the transcript is improved relative to that observed under reference conditions selected from the group consisting of absence of the composition, presence of a reference composition, and combinations thereof.

[0067] In some embodiments, the present disclosure provides a PNPLA3 oligonucleotide composition comprising a first plurality of oligonucleotides capable of directing single-stranded RNA interference which:
[0068] 1) have a common base sequence complementary to a target sequence in a transcript; and
[0069] 2) comprise one or more modified sugar moieties and modified internucleotidic linkages, the oligonucleotide composition being characterized in that, when it is contacted with the transcript in a RNA interference system, RNAi-mediated knockdown of the transcript is improved relative to that observed under reference conditions selected from the group consisting of absence of the composition, presence of a reference composition, and combinations thereof.

[0070] In some embodiments, the present disclosure provides a PNPLA3 oligonucleotide composition comprising a first plurality of oligonucleotides, wherein oligonucleotides of the first plurality are of a particular oligonucleotide type defined by:
[0071] 1) base sequence;
[0072] 2) pattern of backbone linkages;
[0073] 3) pattern of backbone chiral centers; and
[0074] 4) pattern of backbone phosphorus modifications.

[0075] In some embodiments, the present disclosure provides a PNPLA3 oligonucleotide composition comprising a first plurality of oligonucleotides capable of directing single-stranded RNA interference, wherein oligonucleotides of the first plurality are of particular oligonucleotide type defined by:
[0076] 1) base sequence;
[0077] 2) pattern of backbone linkages;
[0078] 3) pattern of backbone chiral centers; and
[0079] 4) pattern of backbone phosphorus modifications.

[0080] In some embodiments, the present disclosure provides an PNPLA3 oligonucleotide composition comprising a first plurality of oligonucleotides of a PNPLA3 oligonucleotide type, wherein the oligonucleotide type is defined by:
[0081] 1) base sequence;
[0082] 2) pattern of backbone linkages;
[0083] 3) pattern of backbone chiral centers; and
[0084] 4) pattern of backbone phosphorus modifications,
   which composition is chirally controlled in that it is enriched, relative to a substantially racemic preparation of oligonucleotides having the same base sequence, for oligonucleotides of the particular oligonucleotide type,
[0085] the oligonucleotide composition being characterized in that, when it is contacted, with the transcript, knockdown of the transcript is improved relative to that observed under reference conditions selected from the group consisting of absence of the composition, presence of a reference composition, and combinations thereof.

[0086] In some embodiments, the present disclosure provides a PNPLA3 oligonucleotide composition comprising a first plurality of oligonucleotides which are capable of directing single-stranded RNA interference and are of a PNPLA3 oligonucleotide type, wherein the oligonucleotide type is defined by:
[0087] 1) base sequence;
[0088] 2) pattern of backbone linkages;
[0089] 3) pattern of backbone chiral centers; and
[0090] 4) pattern of backbone phosphorus modifications,
   which composition is chirally controlled in that it is enriched, relative to a substantially racemic preparation of oligonucleotides having the same base sequence, for oligonucleotides of the particular oligonucleotide type,
[0091] the oligonucleotide composition being characterized in that, when itis contacted with the transcript in a RNA interference system, RNAi-mediated knockdown of the transcript is improved relative to that observed under reference conditions selected from the group consisting of absence of the composition, presence of a reference composition, and combinations thereof.

[0092] In some embodiments, a provided oligonucleotide has any of the Formats illustrated in FIG. 1, or any structural element illustrated in any of the Formats illustrated in FIG. 1.

[0093] In some embodiments, a provided single-stranded RNAi agent has any of the Formats illustrated in FIG. 1, or any structural element illustrated in any of the Formats illustrated in FIG. 1.

[0094] Among other things, the present disclosure presents data showing that various oligonucleotides of the disclosed Formats are capable of directing a decrease in the expression and/or level of a target gene or its gene product, when targeted against any of several different sequences, in any of several different genes. In some embodiments, the present disclosure presents data showing that various RNAi agents of the disclosed Formats are capable of directing RNA interference against any of many different sequences, in any of many different genes.

[0095] In some embodiments, an PNPLA3 oligonucleotide having any of the structures described and/or illustrated herein is capable of directing RNA interference. In some embodiments, a PNPLA3 oligonucleotide having any of the structures described and/or illustrated herein is capable of directing RNase H-mediated knockdown. In some embodiments, a PNPLA3 oligonucleotide having any of the structures described and/or illustrated herein is capable of directing RNA interference and/or RNase H-mediated knockdown. In some embodiments, a PNPLA3 oligonucleotide comprises any structural element of any oligonucleotide described herein, or any Format described herein or illustrated in FIG. 1. In some embodiments, a PNPLA3 oligonucleotide comprises any structural element of any oligonucleotide described herein, or any Format described herein or illustrated in FIG. 1 and is capable of directing RNA interference. In some embodiments, a PNPLA3 oligonucleotide comprises any structural element of any oligonucleotide described herein, or any Format described herein or illustrated in FIG. 1 and is capable of directing RNase H-mediated knockdown. In some embodiments, a PNPLA3 oligonucleotide comprises any structural element of any oligonucleotide described herein, or any Format described herein or illustrated in FIG. 1 and is capable of directing RNA interference and/or RNaseH-mediated knockdown.

[0096] In some embodiments, a RNAi agent comprises any one or more of: a 5′-end structure, a 5′-end region, a seed region, a post-seed region, and a 3′-end region, and an optional additional chemical moiety. In some embodiments, a seed region is any seed region described herein or known in the art. In some embodiments, a post-seed region can be any region between a seed region and a 3′-end region described herein or known in the art. In some embodiments, a 3′-end region can be any 3′-end region described herein or known in the art. In some embodiments, any optional additional chemical moiety can be any optional additional chemical moiety described herein or known in the art. Any individual 5′-end structure, 5′-end region, seed region, post-seed region, 3V-end region, and optional additional chemical moiety described herein or known in the art can be combined, independently, with any other 5′-end structure, 5′-end region, seed region, post-seed region, 3′-end region, and optional additional chemical moiety described herein or known in the art. In some embodiments, as non-limiting examples, a region of a single-stranded RNAi agent is a 5′-end structure, a 5′-end region, a seed region, a post-seed region, a portion of a seed region, a portion of a post-seed region, or a 3′-terminal dinucleotide.

[0097] In some embodiments, the base sequence of a provided oligonucleotide consists of the base sequence of any oligonucleotide disclosed herein. In some embodiments, the base sequence of a provided oligonucleotide comprises the base sequence of any oligonucleotide disclosed herein. In some embodiments, the base sequence of a provided oligonucleotide comprises a sequence comprising the sequence of 15 contiguous bases of the base sequence of any oligonucleotide disclosed herein. In some embodiments, the base sequence of a provided oligonucleotide comprises a sequence comprising the sequence of 20 contiguous bases, with up to 5 mismatches, of the base sequence of any oligonucleotide disclosed herein.

[0098] In some embodiments, a provided oligonucleotide is capable of directing a decrease in the expression and/or level of a target gene or its gene product. In some embodiments, a provided oligonucleotide is capable of directing single-stranded RNAi interference. In some embodiments, a provided oligonucleotide is capable of directing RNaseH-mediated knockdown. In some embodiments, a provided oligonucleotide is capable of directing single-stranded RNA interference and RNaseH-mediated knockdown. In some embodiments, a oligonucleotide comprises a sequence which targets any transcript or gene targeted by a oligonucleotide disclosed herein.

[0099] In some embodiments, provided oligonucleotides target PNPLA3.

[0100] In some embodiments, provided oligonucleotides can be used to decrease or inhibit the activity, level and/or expression of a PNPLA3 gene or its gene product. In some embodiments, provided oligonucleotides can be used to decrease or inhibit the activity, level and/or expression of a gene or its gene product, wherein abnormal or excessive activity, level and/or expression of, a deleterious mutation in, or abnormal tissue or inter- or intracellular distribution of a gene or its gene product is related to, causes and/or is associated with a disorder. In some embodiments, provided oligonucleotides can be used to treat a disorder and/or to manufacture a medicament for the treatment of a disorder related to, caused and/or associated with the abnormal or excessive activity, level and/or expression or abnormal distribution of a gene or its gene product.

[0101] In some embodiments, the present disclosure pertains to methods of using oligonucleosides disclosed herein which are capable of targeting PNPLA3 and useful for treating and/or manufacturing a treatment for a PNPLA3-related disorder.

[0102] In some embodiments, a PNPLA3 oligonucleotide capable of targeting a gene comprises a base sequence which is a portion of or complementary or substantially complementary to a portion of the base sequence of the target gene. In some embodiments, a portion is at least 15 bases long. In some embodiments, a base sequence of a single-stranded RNAi agent can comprise or consist of a base sequence which has a specified maximum number of mismatches from a specified base sequence.

[0103] In some embodiments, a mismatch is a difference between the base sequence or length when two sequences are maximally aligned and compared. As a non-limiting example, a mismatch is counted if a difference exists between the base at a particular location in one sequence and the base at the corresponding position in another sequence. Thus, a mismatch is counted, for example, if a position in one sequence has a particular base (e.g., A), and the corresponding position on the other sequence has a different base (e.g., G, C or U). A mismatch is also counted, e.g., if a position in one sequence has abase (e.g., A), and the corresponding position on the other sequence has no base (e.g. that position is an abasic nucleotide which comprises a phosphate-sugar backbone but no base) or that position is skipped. A single-stranded nick in either sequence (or in the sense or antisense strand) may not be counted as mismatch, for example, no mismatch would be counted if one sequence comprises the sequence 5′-AG-3′, but the other sequence comprises the sequence 5′-AG-3′ with a single-stranded nick between the A and the G. A base modification is generally not considered mismatch, for example, if one sequence comprises a C, and the other sequence comprises a modified C (e.g., 5mC) at the same position, no mismatch may be counted. In some embodiments, for purposes of counting mismatches, substitution of a T for U or vice versa is not considered a mismatch.

[0104] In some embodiments, an PNPLA3 oligonucleotide is complementary or totally or 100% complementary to a target sequence (e.g., a RNA, such as a mRNA), meaning that the base sequence of the oligonucleotide has no mismatches with a sequence which is fully complementary (e.g., base-pairs via Watson-Crick basepairing) to the target sequence. Without wishing to be bound by any particular theory, the disclosure notes that, for a single-stranded RNAi agent, it is not necessary for the 5′-end nucleotide moiety or the 3′-terminal dinucleotide to base-pair with the target. These may be mismatches. In addition, an antisense oligonucleotide or single-stranded RNAi agent can have a small number of internal mismatches and still direct a decrease in the expression and/or level of a target gene or its gene product and/or direct RNase H-mediated knockdown and/or RNA interference. If a first base sequence of a PNPLA3 oligonucleotide, (e.g., antisense oligonucleotide or single-stranded RNAi agent) has a small number of mismatches from a reference base sequence which is 100% complementary to a target sequence, then the first base sequence is substantially complementary to the target sequence. In some embodiments, a PNPLA3 oligonucleotide, (e.g., antisense oligonucleotide or single-stranded RNAi agent) can have a base sequence which is complementary or substantially complementary to a target sequence. In some embodiments, complementarity is determined based on Watson-Crick base pairs (guanine-cytosine and adenine-thymine/uracil), wherein guanine, cytosine, adenine, thymine, uracil may be optionally and independently modified but maintains their pairing hydrogen-bonding patters as unmodified. In some embodiments, a sequence complementary to another sequence comprises at least 5, 6, 7, 8, 9, 10, 11, 12, 13, 14, 15, 16, 17, 18, 19, 20 bases.

[0105] In some embodiments, a PNPLA3 oligonucleotide, oligonucleotide composition or oligonucleotide type has a common pattern of backbone linkages. In some embodiments, a common pattern of backbone linkages comprises at least 10 modified internucleotidic linkages.

[0106] In some embodiments, a common pattern of backbone linkages comprises at least 10 phosphorothioate linkages. In some embodiments, a PNPLA3 oligonucleotide, oligonucleotide composition or oligonucleotide type has a common pattern of backbone chiral centers. In some embodiments, a common pattern of backbone chiral centers comprises at least 1 internucleotidic linkage in the Sp configuration. In some embodiments, a common pattern of backbone chiral centers comprises at least 1 internucleotidic linkage which is phosphorothioate in the Sp configuration. In some embodiments, oligonucleotides in provided compositions have a common pattern of backbone phosphorus modifications. In some embodiments, a provided composition is a PNPLA3 oligonucleotide composition that is chirally controlled in that the composition contains a predetermined level of oligonucleotides of an individual oligonucleotide type, wherein a PNPLA3 oligonucleotide type is defined by:
[0107] 1) base sequence;
[0108] 2) pattern of backbone linkages;
[0109] 3) pattern of backbone chiral centers; and
[0110] 4) pattern of backbone phosphorus modifications.

[0111] As noted above and understood in the art, in some embodiments, base sequence of a PNPLA3 oligonucleotide may refer to the identity and/or modification status of nucleoside residues (e.g., of sugar and/or base components, relative to standard naturally occurring nucleotides such as adenine, cytosine, guanosine, thymine, and uracil) in the oligonucleotide and/or to the hybridization character (i.e., the ability to hybridize with particular complementary residues) of such residues.

[0112] In some embodiments, a particular oligonucleotide type may be defined by
[0113] 1A) base identity;
[0114] 1B) pattern of base modification;
[0115] 1C) pattern of sugar modification;
[0116] 2) pattern of backbone linkages;
[0117] 3) pattern of backbone chiral centers; and
[0118] 4) pattern of backbone phosphorus modifications.

[0119] Thus, in some embodiments, oligonucleotides of a particular type may share identical bases but differ in their pattern of base modifications and/or sugar modifications. In some embodiments, oligonucleotides of a particular type may share identical bases and pattern of base modifications (including, e.g., absence of base modification), but differ in pattern of sugar modifications.

[0120] In some embodiments, oligonucleotides of a particular type are chemically identical in that they have the same base sequence (including length), the same pattern of chemical modifications to sugar and base moieties, the same pattern of backbone linkages (e.g., pattern of natural phosphate linkages, phosphorothioate linkages, phosphorothioate triester linkages, and combinations thereof) the same pattern of backbone chiral centers (e.g., pattern of stereochemistry (Rp/Sp) of chiral internucleotidic linkages), and the same pattern of backbone phosphorus modifications (e.g., pattern of modifications on the internucleotidic phosphorus atom, such as —S⁻ and -L-R¹ of Formula I).

[0121] Among other things, the present disclosure provides oligonucleotide compositions and technologies for optimizing properties, e.g., improved single-stranded RNA interference, RNase H-mediated knockdown, etc. In some embodiments, the present disclosure provides methods for lowering immune response associated with administration of oligonucleotides and compositions thereof (i.e. of administering oligonucleotide compositions so that undesirable immune responses to oligonucleotides in the compositions are reduced, for example relative to those observed with a reference composition of nucleotides of comparable or identical nucleotide sequence). In some embodiments, the present disclosure provides methods for increasing binding to certain proteins by oligonucleotides and compositions thereof. In some embodiments, the present disclosure provides methods for increasing binding to certain proteins by oligonucleotides and compositions thereof. In some embodiments, the present disclosure provides methods for enhancing delivery of oligonucleotides and compositions thereof. Among other things, the present disclosure encompasses the recognition that optimal delivery of oligonucleotides to their targets, in some embodiments, involves balance of oligonucleotides binding to certain proteins so that oligonucleotides can be transported to the desired locations, and oligonucleotide release so that oligonucleotides can be properly released from certain proteins to perform their desired functions, for example, hybridization with their targets, cleavage of their targets, inhibition of translation, modulation of transcript processing, etc. As exemplified in this disclosure, the present disclosure recognizes, among other things, that improvement of oligonucleotide properties can be achieved through chemical modifications and/or stereochemistry.

[0122] In some embodiments, the present disclosure provides a method for treating or preventing a disease, comprising administering to a subject a PNPLA3 oligonucleotide composition described herein.

[0123] In some embodiments, a disease is one in which, after administering a provided composition, knocking down a target nucleic acid via single-stranded RNA interference can repair, restore or introduce a new beneficial function.

[0124] In some embodiments, a common sequence comprises a sequence selected from Table 1A In some embodiments, a common sequence is a sequence selected from Table 1A. In some embodiments, a pattern of backbone chiral centers is selected from those described in Table 1A.

[0125] In some embodiments, the present disclosure provides a method comprising administering a composition comprising a first plurality of oligonucleotides, which composition displays improved delivery as compared with a reference composition comprising a plurality of oligonucleotides, each of which also has the common base sequence but which differs structurally from the oligonucleotides of the first plurality in that:
[0126] individual oligonucleotides within the reference plurality differ from one another in stereochemical structure: and/or
[0127] at least some oligonucleotides within the reference plurality have a structure different from a structure represented by the plurality of oligonucleotides of the composition.

[0128] In some embodiments, the present disclosure provides a method of administering a PNPLA3 oligonucleotide composition comprising a first plurality of oligonucleotides capable of directing a decrease in the expression and/or level of a target gene or its gene product and having a common nucleotide sequence, the improvement that comprises:

[0129] administering a PNPLA3 oligonucleotide comprising a first plurality of oligonucleotides that is characterized by improved delivery relative to a reference oligonucleotide composition of the same common nucleotide sequence.

[0130] In some embodiments, the present disclosure provides a method of administering a PNPLA3 oligonucleotide composition comprising a first plurality of oligonucleotides capable of directing single-stranded RNA interference and having a common nucleotide sequence, the improvement that comprises:

[0131] administering a PNPLA3 oligonucleotide comprising a first plurality of oligonucleotides that is characterized by improved delivery relative to a reference oligonucleotide composition of the same common nucleotide sequence.

[0132] In some embodiments, the present disclosure provides a single-stranded RNAi agent of a PNPLA3 oligonucleotide selected from any of the Tables, including but not limited to Table 1 A, or otherwise disclosed herein. In some embodiments, the present disclosure provides a single-stranded RNAi agent of a PNPLA3 oligonucleotide selected from any of the Tables, including but not limited to Table 1A, or otherwise disclosed herein, wherein the oligonucleotide is conjugated to a lipid moiety.

[0133] In some embodiments, a provided oligonucleotide comprises a lipid moiety. In some embodiments, a lipid moiety is incorporated by conjugation with a lipid. In some embodiments, a lipid moiety is a fatty acid. In some embodiments, a PNPLA3 oligonucleotide is conjugated to a fatty acid. In some embodiments, a provided single-stranded RNAi agent further comprises a lipid. In some embodiments, a provided single-stranded RNAi agent comprises a lipid moiety conjugated at the 9^{th} or 11^{th} nucleotide (counting from the 5′-end). In some embodiments, a PNPLA3 oligonucleotide is conjugated at the base to a fatty acid. In some embodiments, a provided single-stranded RNAi agent comprises a lipid moiety. In some embodiments, a provided single-stranded RNAi agent comprises a lipid moiety conjugated at the base at the 9^{th} or 11^{th} nucleotide (counting from the 5′-end).

[0134] In some embodiments, a single-stranded RNAi agent is any one of the preceding compositions, further comprising one or more additional components.

[0135] In some embodiments, a provided oligonucleotide is capable of degrading a target transcript, e.g., RNA, through both a RNase H mechanism and a RNAi mechanism.

[0136] In some embodiments, conjugation of a lipid moiety to an PNPLA3 oligonucleotide improves at least one property of the oligonucleotide. In some embodiments, improved properties include increased activity (e.g., increased ability to direct a decrease in the expression and/or level of a target gene or its gene product and/or direct single-stranded RNA interference and/or direct RNase H-mediated knockdown) and/or improved distribution to a tissue. In some embodiments, a tissue is muscle tissue. In some embodiments, a tissue is skeletal muscle, gastrocnemius, triceps, heart or diaphragm. In some embodiments, improved properties include reduced hTLR9 agonist activity. In some embodiments, improved properties include hTLR9 antagonist activity. In some embodiments, improved properties include increased hTLR9 antagonist activity.

[0137] In general, properties of oligonucleotide compositions as described herein can be assessed using any appropriate assay.

[0138] Those of skill in the art will be aware of and/or will readily be able to develop appropriate assays for particular oligonucleotide compositions.

### Definitions

[0139] As used herein, the following definitions shall apply unless otherwise indicated. For purposes of this disclosure, the chemical elements are identified in accordance with the Periodic Table of the Elements, CAS version, Handbook of Chemistry and Physics, 75th Ed. Additionally, general principles of organic chemistry are described in “Organic Chemistry”, Thomas Sorrell, University Science Books. Sausalito: 1999, and “March's Advanced Organic Chemistry”, 5th Ed., Ed.: Smith, M. B. and March, J., John Wiley & Sons, New York: 2001.

[0140] As used herein in the specification, “a” or “an” may mean one or more. As used herein in the claim(s), when used in conjunction with the word “comprising”, the words “a” or “an” may mean one or more than one. As used herein “another” may mean at least a second or more.

[0141] The term “about” refers to a relative term denoting an approximation of plus or minus 10% of the nominal value to which it refers, or in one embodiment, of plus or minus 5%, or, in another embodiment, of plus or minus 2%. For the field of this disclosure, this level of approximation is appropriate unless the value is specifically stated to require a tighter range.

[0142] Aliphatic: As used herein, “aliphatic” means a straight-chain (i.e., unbranched) or branched, substituted or unsubstituted hydrocarbon chain that is completely saturated or that contains one or more units of unsaturation, or a substituted or unsubstituted monocyclic, bicyclic, or polycyclic hydrocarbon ring that is completely saturated or that contains one or more units of unsaturation (but not aromatic), or combinations thereof. In some embodiments, aliphatic groups contain 1-50 aliphatic carbon atoms. In some embodiments, aliphatic groups contain 1-20 aliphatic carbon atoms. In other embodiments, aliphatic groups contain 1-10 aliphatic carbon atoms. In other embodiments, aliphatic groups contain 1-9 aliphatic carbon atoms. In other embodiments, aliphatic groups contain 1-8 aliphatic carbon atoms. In other embodiments, aliphatic groups contain 1=7 aliphatic carbon atoms. In other embodiments, aliphatic groups contain 1-6 aliphatic carbon atoms. In still other embodiments, aliphatic groups contain 1-5 aliphatic carbon atoms, and in yet other embodiments, aliphatic groups contain 1, 2, 3, or 4 aliphatic carbon atoms. Suitable aliphatic groups include, but are not limited to, linear or branched, substituted or unsubstituted alkyl, alkenyl, alkynyl groups and hybrids thereof such as (cycloalkyl)alkyl, (cycloalkenyl)alkyl or (cycloalkyl)alkenyl.

[0143] Alkenyl: As used herein, the term “alkenyl” refers to an alkyl group, as defined herein, having one or more double bonds.

[0144] Alkyl: As used herein, the term “alkyl” is given its ordinary meaning in the art and may include saturated aliphatic groups, including straight-chain alkyl groups, branched-chain alkyl groups, cycloalkyl (alicyclic) groups, alkyl substituted cycloalkyl groups, and cycloalkyl substituted alkyl groups. In some embodiments, an alkyl has 1-100 carbon atoms. In certain embodiments, a straight chain or branched chain alkyl has about 1-20 carbon atoms in its backbone (e.g., C₁-C₂₀ for straight chain, C₂-C₂₀ for branched chain), and alternatively, about 1-10. In some embodiments, cycloalkyl rings have from about 3-10 carbon atoms in their ring structure where such rings are monocyclic, bicyclic, or polycyclic, and alternatively about 5, 6 or 7 carbons in the ring structure. In some embodiments, an alkyl group may be a lower alkyl group, wherein a lower alkyl group comprises 1-4 carbon atoms (e.g., C₁-C₄ for straight chain lower alkyls).

[0145] Alkynyl: As used herein, the term “alkynyl” refers to an alkyl group, as defined herein, having one or more triple bonds.

[0146] Antisense: The term “Antisense”, as used herein, refers to a characteristic of an oligonucleotide or other nucleic acid having a base sequence complementary or substantially complementary to a target nucleic acid to which it is capable of hybridizing. In some embodiments, a target nucleic acid is a target gene mRNA. In some embodiments, hybridization is required for or results in at one activity, e.g., a decrease in the level, expression or activity of the target nucleic acid or a gene product thereof. The term “antisense oligonucleotide”, as used herein, refers to an oligonucleotide complementary to a target nucleic acid. In some embodiments, an antisense oligonucleotide is capable of directing a decrease in the level, expression or activity of the target nucleic acid or a gene product thereof. In some embodiments, an antisense oligonucleotide is capable of directing a decrease in the level, expression or activity of the target nucleic acid or a gene product thereof, via a mechanism that involves RNaseH, steric hindrance and/or RNA interference.

[0147] Approximately: As used herein, the terms “approximately” or “about” in reference to a number are generally taken to include numbers that fall within a range of 5%, 103%, 15%, or 20% in either direction (greater than or less than) of the number unless otherwise stated or otherwise evident from the context (except where such number would be less than 0% or exceed 100% of a possible value). In some embodiments, use of the term “about” in reference to dosages means ±5 mg/kg/day.

[0148] Aryl: The term “aryl”, as used herein, used alone or as part of a larger moiety as in “aralkyl,” “aralkoxy,” or “aryloxyalkyl,” refers to monocyclic, bicyclic or polycyclic ring systems having a total of five to thirty ring members, wherein at least one ring in the system is aromatic. In some embodiments, an aryl group is a monocyclic, bicyclic or polycyclic ring system having a total of five to fourteen ring members, wherein at least one ring in the system is aromatic, and wherein each ring in the system contains 3 to 7 ring members. In some embodiments, an aryl group is a biaryl group. The term “aryl” may be used interchangeably with the term “aryl ring.” In certain embodiments of the present disclosure, “aryl” refers to an aromatic ring system which includes, but not limited to, phenyl, biphenyl, naphthyl, binaphthyl, anthracyl and the like, which may bear one or more substituents. Also included within the scope of the term “aryl,” as it is used herein, is a group in which an aromatic ring is fused to one or more non-aromatic rings, such as indanyl, phthalimidyl, naphthimidyl, phenanthridinyl, or tetrahydronaphthyl, and the like.

[0149] Characteristic portion: As used herein, the phrase a “characteristic portion” of a protein or polypeptide is one that contains a continuous stretch of amino acids, or a collection of continuous stretches of amino acids, that together are characteristic of a protein or polypeptide. Each such continuous stretch generally will contain at least two amino acids. In general, a characteristic portion is one that, in addition to the sequence identity specified above, shares at least one functional characteristic with the relevant intact protein.

[0150] Characteristic structural element: The term “characteristic structural element” or “structural element” refers to a distinctive structural element that is found in all members of a family of polypeptides, small molecules, or nucleic acids, and therefore can be used by those of ordinary skill in the art to define members of the family. In some embodiments, a structural element of a single-stranded RNAi agent includes, but is not limited to: a 5′-end structure, a 5′-end region, a 5′ nucleotide moiety, a seed region, a post-seed region, a 3′-end region, a 3′-terminal dinucleotide, a 3′ cap, a pattern of modifications, a pattern of stereochemistry in the backbone, additional chemical moieties, etc.

[0151] Comparable: The term “comparable” is used herein to describe two (or more) sets of conditions or circumstances that are sufficiently similar to one another to permit comparison of results obtained or phenomena observed. In some embodiments, comparable sets of conditions or circumstances are characterized by a plurality of substantially identical features and one or a small number of varied features. Those of ordinary skill in the art will appreciate that sets of conditions are comparable to one another when characterized by a sufficient number and type of substantially identical features to warrant a reason able conclusion that differences in results obtained or phenomena observed under the different sets of conditions or circumstances are caused by or indicative of the variation in those features that are varied.

[0152] Cycloaliphatic: The term “cycloaliphatic,” “carbocycle,” “carbocyclyl,” “carbocyclic radical,” and “carbocyclic ring,” are used interchangeably, and as used herein, refer to saturated or partially unsaturated, but non-aromatic, cyclic aliphatic monocyclic, bicyclic, or polycyclic ring systems, as described herein, having, unless otherwise specified, from 3 to 30 ring members. Cycloaliphatic groups include, without limitation, cyclopropyl, cyclobutyl, cyyclopentyl, cyclopentenyl, cyclohexyl, cyclohexenyl, cycloheptyl, cycloheptenyl, cyclooctyl, cyclooctenyl, norbomyl, adamantyl, and cyclooctadienyl. In some embodiments, a cycloaliphatic group has 3-6 carbons. In some embodiments, a cycloaliphatic group is saturated and is cycloalkyl. The term “cycloaliphatic” may also include aliphatic rings that are fused to one or more aromatic or nonaromatic rings, such as decahydronaphthyl or tetrahydronaphthyl. In some embodiments, a cycloaliphatic group is bicyclic. In some embodiments, a cycloaliphatic group is tricyclic. In some embodiments, a cycloaliphatic group is poly cyclic. In some embodiments, “cycloaliphatic” refers to C₃-C₆ monocyclic hydrocarbon, or C₈-C₁₀ bicyclic or polycyclic hydrocarbon that is completely saturated or that contains one or more units of unsaturation, but which is not aromatic, that has a single point of attachment to the rest of the molecule, or a C₉-C₁₆ polycyclic hydrocarbon that is completely saturated or that contains one or more units of unsaturation, but which is not aromatic, that has a single point of attachment to the rest of the molecule.

[0153] Heteroaliphatic: The term “heteroaliphatic”, as used herein, is given its ordinary meaning in the art and refers to aliphatic groups as described herein in which one or more carbon atoms are independently replaced with one or more heteroatoms (e.g., oxygen, nitrogen, sulfur, silicon, phosphorus, and the like). In some embodiments, one or more units selected from C, CH, CH₂, and CH₃ are independently replaced by one or more heteroatoms (including oxidized and/or substituted form thereof). In some embodiments, a heteroaliphatic group is heteroalkyl. In some embodiments, a heteroaliphatic group is heteroalkenyl.

[0154] Heteroalkyl: The term “heteroalkyl”, as used herein, is given its ordinary meaning in the art and refers to alkyl groups as described herein in which one or more carbon atoms are independently replaced with one or more heteroatoms (e.g., oxygen, nitrogen, sulfur, silicon, phosphorus, and the like). Examples of heteroalkyl groups include, but are not limited to, alkoxy, poly(ethylene glycol)-, alkyl-substituted amino, tetrahydrofuranyl, piperidinyl, morpholinyl, etc.

[0155] Heteroaryl: The terms “heteroaryl” and “heteroar-” as used herein, used alone or as part of a larger moiety, e.g., “heteroaralkyl,” or “heteroaralkoxy,” refer to monocyclic, bicyclic or polycyclic ring systems having a total of five to thirty ring members, wherein at least one ring in the system is aromatic and at least one aromatic ring atom is a heteroatom. In some embodiments, a heteroaryl group is a group having 5 to 10 ring atoms (i.e., monocyclic, bicyclic or polycyclic), in some embodiments 5, 6, 9, or 10 ring atoms. In some embodiments, a heteroaryl group has 6, 10, or 14 π electrons shared in a cyclic array; and having, in addition to carbon atoms, from one to five heteroatoms. Heteroaryl groups include, without limitation, thienyl, furanyl, pyrrolyl, imidazolyl, pyrazolyl, triazolyl, tetrazolyl, oxazolyl, isoxazolyl, oxadiazolyl, thiazolyl, isothiazolyl, thiadiazolyl, pyridyl, pyridazinyl, pyrimidinyl, pyrazinyl, indolizinyl, purinyl, naphthyridinyl, and pteridinyl. In some embodiments, a heteroaryl is a heterobiaryl group, such as bipyridyl and the like. The terms “heteroaryl” and “heteroar-”, as used herein, also include groups in which a heteroaromatic ring is fused to one or more aryl, cycloaliphatic, or heterocyclyl rings, where the radical or point of attachment is on the heteroaromatic ring. Non-limiting examples include indolyl, isoindolyl, benzothienyl, benzofuranyl, dibenzofuranyl, indazolyl, benzimidazolyl, benzthiazolyl, quinolyl, isoquinolyl, cinnolinyl, phthalazinyl, quinazolinyl, quinoxalinyl, 4H-quinolizinyl, carbazolyl, acridinyl, phenazinyl, phenothiazinyl, phenoxazinyl, tetrahydroquinolinyl, tetrahydroisoquinolinyl, and pyrido[2,3-b]-1,4-oxazin-3(4H)-one. A heteroaryl group may be monocyclic, bicyclic or polycyclic. The term “heteroaryl” may be used interchangeably with the terms “heteroacyl ring,” “heteroaryl group,” or “heteroaromatic,” any of which terms include rings that are optionally substituted. The term “heteroaralkyl” refers to an alkyl group substituted by a heteroaryl group, wherein the alkyl and heteroaryl portions independently are optionally substituted.

[0156] Heteroatom: The term “heteroatom”, as used herein, means an atom that is not carbon or hydrogen. In some embodiments, a heteroatom is oxygen, sulfur, nitrogen, phosphorus, or silicon (including any oxidized form of nitrogen, sulfur, phosphorus, or silicon; the quatemized form of any basic nitrogen or a substitutable nitrogen of a heterocyclic ring (for example, N as in 3,4-dihydro-2H-pyrrolyl), NH (as in pyrrolidinyl) or NR⁺ (as in N-substituted pyrrolidinyl); etc.).

[0157] Heterocycle: As used herein, the terms “heterocycle,” “heterocyclyl,” “heterocyclic radical,” and “heterocyclic ring”, as used herein, are used interchangeably and refer to a monocyclic, bicyclic or polycyclic ring moiety (e.g., 3-30 membered) that is saturated or partially unsaturated and has one or more heteroatom ring atoms. In some embodiments, a heterocyclyl group is a stable 5- to 7 membered monocyclic or 7- to 10-membered bicyclic heterocyclic moiety that is either saturated or partially unsaturated, and having, in addition to carbon atoms, one or more, preferably one to four, heteroatoms, as defined above. When used in reference to a ring atom of a heterocycle, the term “nitrogen” includes substituted nitrogen. As an example, in a saturated or partially unsaturated ring having 0-3 heteroatoms selected from oxygen, sulfur and nitrogen, the nitrogen may be N (as in 3,4-dihydro-2H-pyrrolyl), NH (as in pyrrolidinyl), or ⁺NR (as in N-substituted pyrrolidinyl). A heterocyclic ring can be attached to its pendant group at any heteroatom or carbon atom that results in a stable structure and any of the ring atoms can be optionally substituted. Examples of such saturated or partially unsaturated heterocyclic radicals include, without limitation, tetrahydrofuranyl, tetrahydrothienyl, pyrrolidinyl, piperidinyl, pyrrolinyl, tetrahydroquinolinyl, tetrahydroisoquinolinyl, decahydroquinolinyl, oxazolidinyl, piperazinyl, dioxanyl, dioxolanyl, diazepinyl, oxazepinyl, thiazepinyl, morpholinyl, and quinuclidinyl. The terms “heterocycle,” “heterocyclyl,” “heterocyclyl ring,” “heterocyclic group,” “heterocyclic moiety,” and “heterocyclic radical,” are used interchangeably herein, and also include groups in which a heterocycyl ring is fused to one or more aryl, heteroaryl, or cycloaliphatic rings, such as indolinyl, 3H-indolyl, chromanyl, phenanthridinyl, or tetrahydroquinolinyl. A heterocyclyl group may be monocyclic, bicyclic or polycyclic. The term “heterocyclylalkyl” refers to an alkyl group substituted by a heterocyclyl wherein the alkyl and heterocyclyl portions independently are optionally substituted.

[0158] Lower alkyl: The term “lower alkyl” refers to a C₁₋₄ straight or branched alkyl group. Example lower alkyl groups are methyl, ethyl, propyl, isopropyl, butyl, isobutyl, and tert-butyl.

[0159] Lower haloalkyl: The term “lower haloalkyl” refers to a C₁₋₄ straight or branched alkyl group that is substituted with one or more halogen atoms.

[0160] Optionally Substituted: As described herein, compounds, e.g., oligonucleotides, of the disclosure may contain optionally substituted and/or substituted moieties. In general, the term “substituted,” whether preceded by the term “optionally” or not, means that one or more hydrogens of the designated moiety are replaced with a suitable substituent. Unless otherwise indicated, an “optionally substituted” group may have a suitable substituent at each substitutable position of the group, and when more than one position in any given structure may be substituted with more than one substituent selected from a specified group, the substituent may be either the same or different at every position. In some embodiments, an optionally substituted group is unsubstituted. Combinations of substituents envisioned by this disclosure are preferably those that result in the formation of stable or chemically feasible compounds. The term “stable,” as used herein, refers to compounds that are not substantially altered when subjected to conditions to allow for their production, detection, and, in certain embodiments, their recovery, purification, and use for one or more of the purposes disclosed herein.

[0161] Suitable monovalent substituents on a substitutable atom, e.g., a suitable carbon atom, are independently halogen; —(CH₂)₀₋₄R^{∘}; —(CH₂)₀₋₄OR^{∘}; —O(CH₂)₀₋₄R^{∘}, —O—(CH₂)₀₋₄C(O)OR^{∘}; —(CH₂)₀₋₄CH(OR^{∘}); —(CH₂)₀₋₄Ph, which may be substituted with R^{∘}; —(CH₂)₀₋₄O(CFH₂)₀₋₁Ph which may be substituted with R^{∘}; —CH═CHPh, which may be substituted with R^{∘}; —(CH₂)₁₋₄O(CH₂)₀₋₄-pyridyl which may be substituted with R^{∘}; —NO₂; —CN; —N₃; —(CH₂)₀₋₄N(R))₂; —(CH₂)₀₋₄N(R^{∘})C(O)R^{∘}; —N(R^{∘})C(S)R^{∘}; —(CH₂)₀₋₄N(R^{∘})C(O)NR^{∘}₂; —N(R^{∘})C(S)NR^{∘}₂; —(CH₂)₀₋₄N(R^{∘})C(O)OR^{∘}; —N(R^{∘})N(R^{∘})C(O)R^{∘}; —N(R^{∘})N(R^{∘})C(O)NR^{∘}₂; —N(R^{∘})N(R^{∘})C(O)OR^{∘}; —(CH₂)₀₋₄C(O)R^{∘}; —C(S)R^{∘}; —(CH₂)₀₋₄C(O)OR^{∘}; —(CH₂)₀₋₄C(O)SR^{∘}; —(CH₂)₀₋₄C(O)OSiR^{∘}₃; —(CH₂)₁₋₄OC(O)R^{∘}; —OC(O)(CH₂)₀₋₄SR; —SC(S)SR^{∘}; —(CH₂)₀₋₄SC(O)R^{∘}; —(CH₂)₀₋₄C(O)NR^{∘}₂; —C(S)NR^{∘}₂; —C(S)SR^{∘}; SC(S)SR^{∘}, —(CH₂)₀₋₄OC(O)NR^{∘}₂; —C(O)N(OR^{∘})R^{∘}; —C(O)C(O)R^{∘}; —C(O)CH₂C(O)R^{∘}; —C(NOR^{∘})R^{∘}; —(CH₂)₀₋₄ SSR^{∘}; —(CH₂)₀₋₄S(O)₂R^{∘}; —(CH₂)₀₋₄S(O)₂OR^{∘}; —(CH₂)₀₋₄OS(O)₂R^{∘}; —S(O)₂NR^{∘}₂; —(CH₂)₀₋₄S(O)R^{∘}; —N(R^{∘})S(O)₂NR^{∘)}₂; —N(R^{∘})S(O)₂R^{∘}; —N(OR^{∘})R^{∘}; —C(NH)NR^{∘}₂; —Si(R^{∘})₃; —OSi(R^{∘})₃; —B(R^{∘})₂; —OB(R^{∘})₂; —OB(OR^{∘})₂; —P(R^{∘})₂; —P(OR^{∘})₂; —OP(R^{∘})₂; —OP(OR^{∘})₂; —P(O)(R^{∘})₂; —P(O)(OR^{∘})₂; —OP(O)(R^{∘})₂; —OP(O)(OR^{∘})₂; —OP(O)(OR^{∘})(SR^{∘}); —SP(O)(R^{∘})₂; —SP(O)(OR^{∘})₂; —N(R^{∘})P(O)(R^{∘})₂; —N(R^{∘})P(O)(OR^{∘})₂; —P(R^{∘})₂[B(R^{∘})₃]; —P(OR^{∘})₂[B(R^{∘})₃]; —OP(R^{∘})₂[B(R^{∘})₃]; —OP(OR^{∘}₂[B(R^{∘})₃]; —(C₁₋₄ straight or branched alkylene)O—N(R^{∘})₂; or —(C₁₋₄ straight or branched alkylene)C(O)O—N(R^{∘})₂, wherein each R^{∘} may be substituted as defined below and is independently hydrogen, C₁₋₂₀ aliphatic, C₁₋₂₀ heteroaliphatic having 1-5 heteroatoms independently selected from nitrogen, oxygen, sulfur, silicon and phosphorus, —CH₂—(C₆₋₁₄ aryl), —O(CH₂)₀₋₁(C₆₋₁₄ aryl), —CH₂-(5-14 membered heteroaryl ring), a 5-20 membered, monocyclic, bicyclic, or polycyclic, saturated, partially unsaturated or aryl ring having 0-5 heteroatoms independently selected from nitrogen, oxygen, sulfur, silicon and phosphorus, or, notwithstanding the definition above, two independent occurrences of R^{∘}, taken together with their intervening atom(s), forma 5-20 membered, monocyclic, bicyclic, or polycyclic, saturated, partially unsaturated or aryl ring having 0-5 heteroatoms independently selected from nitrogen, oxygen, sulfur, silicon and phosphorus, which may be substituted as defined below.

[0162] Suitable monovalent substituents on R^{∘} (or the ring formed by taking two independent occurrences of R^{∘} together with their intervening atoms), are independently halogen, —(CH₂)₀₋₂R^{•}, -(haloR^{•}), —(CH₂)₀₋₂OH, —(CH₂)₀₋₂OR^{•}, —(CH₂)₀₋₂CH(OR^{•})₂; —O(haloR^{•}), —CN, —N₃, —(CH₂))₂C(O)R^{•}, —(CH₂)₀₋₂C(O)OH, —(CH₂)₀₋₂C(O)OR^{•}, —(CH₂)₀₋₂SR^{•}, —(CH₂)O₀₋₂SH, —(CH₂)₀₋₂NH₂, —(CH₂)₀₋₂NHR^{•}, —(CH₂)₀₋₂NR^{•}₂, —NO₂, —Si^{•}R^{•}₃, —OSiRe₃, —C(O)SR^{•}, —(C₁₋₄ straight or branched alkylene)C(O)OR^{•}, or —SSR^{•} wherein each R^{•} is unsubstituted or where preceded by “halo” is substituted only with one or more halogens, and is independently selected from C₁₋₄ aliphatic, —CH₂Ph, —O(CH₂)₀₋₁ Ph, and a 5-6-membered saturated, partially unsaturated, or aryl ring having 0-4 heteroatoms independently selected from nitrogen, oxygen, and sulfur. Suitable divalent substituents on a saturated carbon atom of R^{∘} include and ═S.

[0163] Suitable divalent substituents, e.g., on a suitable carbon atom, are independently the following: ═O, ═S, NNR*₂, ═NNHC(O)R*, ═NNHC(O)OR*, ═NNHS(O)₂R*, NR*, ═NOR*, —O(C(R^{∘}₂))₂₋₃O—, or —S(C(R*₂))₂₋₃S, wherein each independent occurrence of R^{∘} is selected from hydrogen, C₁₋₆ aliphatic which may be substituted as defined below, and an unsubstituted 5-6-membered saturated, partially unsaturated, or aryl ring having 0-4 heteroatoms independently selected from nitrogen, oxygen, and sulfur. Suitable divalent substituents that are bound to vicinal substitutable carbons of an “optionally substituted” group include: —O(CR*₂)₂₋₃O—, wherein each independent occurrence of R* is selected from hydrogen, C₁₋₆ aliphatic which may be substituted as defined below, and an unsubstituted 5-6-member d saturated, partially unsaturated, or aryl ring having 0-4 heteroatoms independently selected from nitrogen, oxygen, and sulfur.

[0164] Suitable substituents on the aliphatic group of R* are independently halogen, —R^{•}, -(haloR^{•}), —OH, —OR^{•}, —O(haloR^{•}), —CN, —C(O)OH, —C(O)OR^{•}, —NH₂, —NHR^{•}, —NR^{•}₂, or —NO₂, wherein each R^{•} is unsubstituted or where preceded by “halo” is substituted only with one or more halogens, and is independently C₁ . . . , aliphatic, —CH₂Ph, —O(CH₂)₀₋₁Ph, or a 5-6-membered saturated, partially unsaturated, or aryl ring having 0-4 heteroatoms independently selected from nitrogen, oxygen, and sulfur.

[0165] Partially unsaturated: As used herein, the term “partially unsaturated” refers to a ring moiety that includes at least one double or triple bond. The term “partially unsaturated” is intended to encompass rings having multiple sites of unsaturation, but is not intended to include aryl or heteroaryl moieties, as herein defined.

[0166] RNA interference: As used herein, the terms “RNA interference” or “RNAi” refer to a post-transcriptional, targeted gene-silencing process involving the RISC (RNA-induced silencing complex). A process of RNAi reportedly naturally occurs when ribonuclease III (Dicer) cleaves a longer dsRNA into shorter fragments called siRNAs. A naturally-produced siRNA (small interfering RNA) is typically about 21 to 23 nucleotides long with an about 19 basepair duplex and two single-stranded overhangs and is typically RNA. These RNA segments then reportedly direct the degradation of the target nucleic acid, such as a mRNA or pre-mRNA. Dicer has reportedly also been implicated in the excision of 21- and 22-nucleotide small temporal RNAs (stRNAs) from precursor RNA of conserved structure that are implicated in translational control. Hutvagner et al. 2001, Science, 293, 834. Those skilled in the art are aware that RNAi can be mediated by a single-stranded or a double-stranded oligonucleotide that includes a sequence complementary or substantially complementary to a target sequence (e.g., in a target mRNA). Thus, in some embodiments of the present disclosure, a single-stranded oligonucleotide as described herein may act as an RNAi agent; in some embodiments, a double-stranded oligonucleotide as described herein may act as an RNAi agent. In some embodiments, an RNAi response involves an endonuclease complex, commonly referred to as an RNA-induced silencing complex (RISC), which directs cleavage of single-stranded mRNA complementary to the antisense strand of the siRNA. In some embodiments, RISC directs cleavage of target RNA complementary to provided oligonucleotides which can function as single-stranded RNAi agent. In some embodiments, cleavage of a target RNA takes place in the middle of the region complementary to the antisense strand of a siRNA duplex or single-stranded RNAi agent. In some embodiments, RNA interference is directed by a single-stranded oligonucleotide which acts as a single-stranded RNAi agent that can direct RNA interference in a mechanism involving the RISC pathway.

[0167] RNAi agent: As used herein, the term “RNAi agent,” “iRNA agent”, and the like, refer to a PNPLA3 oligonucleotide that, when administered to a system in which a target gene product (e.g., a transcript, such as a pre-mRNA or a mRNA, of a target gene) is being or has been expressed, reduces level and/or activity (e.g., translation) of that target gene product. In some embodiments, an RNAi agent may be or comprise a single-stranded oligonucleotide or a double-stranded oligonucleotide. In some embodiments, an RNAi agent may have a structure recognized in the art as a siRNA (short inhibitory RNA), shRNA (short or small hairpin RNA), dsRNA (double-stranded RNA), microRNA, etc. In some embodiments, an RNAi agent may specifically bind to a RNA target a transcript of a target gene). In some embodiments, upon binding to its target, and RNAi agent is loaded to the RISC (RNA-induced silencing complex). In some embodiments, an RNAi agent directs degradation of, and/or inhibits translation of, its target, in some embodiments via a mechanism involving the RISC (RNA-induced silencing complex) pathway. In some embodiments, an RNAi agent is a PNPLA3 oligonucleotide that activates the RISC complex/pathway. In some embodiments, an RNAi agent comprises an antisense strand sequence. In some embodiments, an RNAi agent includes only one oligonucleotide strand (e.g., is a single-stranded oligonucleotide). In some embodiments, a single-stranded RNAi agent oligonucleotide can be or comprise a sense or antisense strand sequence, as described by Sioud. 2005 Mol. Biol. 348: 1079-1090. In some embodiments, a RNAi agent is a compound capable of directing RNA interference. In some embodiments, a RNAi agent may have a structure or format as is found in “canonical” siRNA structure). In some embodiments, an RNAi agent may have a structure that differs from a “canonical” siRNA structure. To (Ave but a few examples, in some embodiments, an RNAi agent can be longer or shorter than the canonical, can be blunt-ended, and/or can comprise one or more modifications, mismatches, gaps and/or nucleotide replacements. In some embodiments, an RNAi agent contains a 3′-end cap as described in the present disclosure. Without wishing to be bound by any particular theory, Applicant proposes that, in some embodiments, a 3-end cap can allow both of two functions: (1) allowing RNA interference; and (2) increasing duration of activity and/or biological half-life, which may be accomplished, for example, by increased binding to the PAZ domain of Dicer and/or one or more Ago proteins and/or reducing or preventing degradation of the RNAi agent (e.g., by nucleases such as those in the serum or intestinal fluid). In some embodiments, a RNAi agent of the present disclosure targets (e.g., binds to, anneals to, etc.) a target mRNA. In some embodiments, exposure of a RNAi agent to its target results in a decrease of activity, level and/or expression, e.g., a “knock-down” or “knock-out” of the target. Particularly, in some embodiments, in the case of a disease, disorder and/or condition characterized by over-expression and/or by of a target gene, administration of a RNAi agent to a cell, tissue, or subject knocks down the target gene enough to restore a normal level of activity, or to reduce activity to a level that can alleviate, ameliorate, relieve, inhibit, prevent, delay onset of, reduce severity of, and/or reduce incidence of one or more symptoms or features of a disease, disorder, and/or condition of the disease, disorder, and/or condition. In some embodiments, a RNAi agent is double-stranded comprising an antisense strand which is a single-stranded RNAi agent as described herein, which, in combination with a sense strand, can direct RNA interference.

[0168] Single-stranded RNA interference: As used herein, the phrases “single-stranded RNAi” or “single-stranded RNA interference” or the like refer to a process or method of gene silencing directed at least in part by administration of a single-stranded RNAi agent to a system (e.g., cells, tissues, organs, subjects, etc.) where RNAi is to be directed by the agent, and which requires the RISC pathway. The terms may be utilized herein in certain instances to distinguish from “double-stranded RNAi” or “double-stranded RNA interference”, in which a double-stranded RNAi agent is administered to a system, and may be further processed, for example so that one of its two strands is loaded to RISC to, e.g., suppress translation, cleave target RNA, etc.

[0169] Single stranded RNAi agent: As used herein, the phrase “single-stranded RNAi agent” refers to a single-stranded oligonucleotide that can direct single-stranded RNA interference (RNAi or iRNA) or gene silencing via the RISC pathway. A single-stranded RNAi agent can comprise a polymer of one or more single-stranded nucleotides.

[0170] Subject: As used herein, the term “subject” or “test subject” refers to any organism to which a provided compound or composition is administered in accordance with the present disclosure e.g., for experimental, diagnostic, prophylactic and/or therapeutic purposes. Typical subjects include animals (e.g., mammals such as mice, rats, rabbits, non-human primates, and humans; insects; worms; etc.) and plants. In some embodiments, a subject may be suffering from and/or susceptible to a disease, disorder and/or condition.

[0171] Substantially: As used herein, the term “substantially” refers to the qualitative condition of exhibiting total or near-total extent or degree of a characteristic or property of interest. A base sequence which is substantially complementary to a second sequence is not identical to the second sequence, but is mostly or nearly identical to the second sequence. In addition, one of ordinary skill in the biological arts will understand that biological and chemical phenomena rarely, if ever, go to completion and/or proceed to completeness or achieve or avoid an absolute result. The term “substantially” is therefore used herein to capture the potential lack of completeness inherent in many biological and/or chemical phenomena.

[0172] Suffering from: An individual who is “suffering from” a disease, disorder and/or condition has been diagnosed with and/or displays one or more symptoms of a disease, disorder and/or condition.

[0173] Susceptible to: An individual who is “susceptible to” a disease, disorder and/or condition is one who has a higher risk of developing the disease, disorder and/or condition than does a member of the general public. In some embodiments, an individual who is susceptible to a disease, disorder and/or condition may not have been diagnosed with the disease, disorder and/or condition. In some embodiments, an individual who is susceptible to a disease, disorder and/or condition may exhibit symptoms of the disease, disorder and/or condition. In some embodiments, an individual who is susceptible to a disease, disorder and/or condition may not exhibit symptoms of the disease, disorder and/or condition. In some embodiments, an individual who is susceptible to a disease, disorder, and/or condition will develop the disease, disorder, and/or condition. In some embodiments, an individual who is susceptible to a disease, disorder, and/or condition will not develop the disease, disorder, and/or condition.

[0174] Systemic: The phrases “systemic administration,” “administered systemically,” “peripheral administration,” and “administered peripherally” as used herein have their art-understood meaning referring to administration of a compound or composition such that it enters the recipient's system.

[0175] Therapeutic agent: As used herein, the phrase “therapeutic agent” refers to any agent that, when administered to a subject, has a therapeutic effect and/or elicits a desired biological and/or pharmacological effect. In some embodiments, a therapeutic agent is any substance that can be used to alleviate, ameliorate, relieve, inhibit, prevent, delay onset of, reduce severity of, and/or reduce incidence of one or more symptoms or features of a disease, disorder, and/or condition.

[0176] Therapeutically effective amount: As used herein, the term “therapeutically effective amount” means an amount of a substance (e.g., a therapeutic agent, composition, and/or formulation) that elicits a desired biological response when administered as part of a therapeutic regimen. In some embodiments, a therapeutically effective amount of a substance is an amount that is sufficient, when administered to a subject suffering from or susceptible to a disease, disorder, and/or condition, to treat, diagnose, prevent, and/or delay the onset of the disease, disorder, and/or condition. As will be appreciated by those of ordinary skill in this art, the effective amount of a substance may vain depending on such factors as the desired biological endpoint, the substance to be delivered, the target cell or tissue, etc. For example, the effective amount of compound in a formulation to treat a disease, disorder, and/or condition is the amount that alleviates, ameliorates, relieves, inhibits, prevents, delays onset of, reduces severity of and/or reduces incidence of one or more symptoms or features of the disease, disorder, and/or condition. In some embodiments, a therapeutically effective amount is administered in a single dose; in some embodiments, multiple unit doses are required to deliver a therapeutically effective amount.

[0177] Treats: As used herein, the term “treat,” “treatment,” or “treating” refers to any method used to partially or completely alleviate, ameliorate, relieve, inhibit, prevent, delay onset of, reduce severity of, and/or reduce incidence of one or more symptoms or features of a disease, disorder, and/or condition. Treatment may be administered to a subject who does not exhibit sips of a disease, disorder, and/or condition. In some embodiments, treatment may be administered to a subject who exhibits only early signs of the disease, disorder, and/or condition, for example for the purpose of decreasing the risk of developing pathology associated with the disease, disorder, and/or condition.

[0178] Unsaturated: The term “unsaturated,” as used herein, means that a moiety has one or more units of unsaturation.

[0179] Wild-type: As used herein, the term “wild-type” has its art-understood meaning that refers to an entity having a structure and/or activity as found in nature in a “normal” (as contrasted with mutant, diseased, altered, etc) state or context. Those of ordinary skill in the art will appreciate that wild type genes and polypeptides often exist in multiple different forms (e.g., alleles).

[0180] Nucleic acid: The term “nucleic acid”, as used herein, includes any nucleotides and polymers thereof. The term “polynucleotide”, as used herein, refers to a polymeric form of nucleotides of any length, either ribonucleotides (RNA) or deoxyribonucleotides (DNA). These terms refer to the primary structure of the molecules and, thus, include double- and single-stranded DNA, and double- and single-stranded RNA. These terms include, as equivalents, analogs of either RNA or DNA made from modified nucleotides and/or modified polynucleotides, such as, though not limited to, methylated, protected and/or capped nucleotides or polynucleotides. The terms encompass poly- or oligo-ribonucleotides (RNA) and poly- or oligo-deoxyribonucleotides (DNA), RNA or DNA derived from N-glycosides or C-glycosides of nucleobases anchor modified nucleobases; nucleic acids derived from sugars an &or modified sugars; and nucleic acids derived from phosphate bridges and/or modified internucleotide linkages. The term encompasses nucleic acids containing any combinations of nucleobases, modified nucleobases, sugars, modified sugars, phosphate bridges or modified internucleotidic linkages. Examples include, and are not limited to, nucleic acids containing ribose moieties, nucleic acids containing deoxy-ribose moieties, nucleic acids containing both ribose and deoxyribose moieties, nucleic acids containing ribose and modified ribose moieties. Unless otherwise specified, the prefix poly- refers to a nucleic acid containing 2 to about 10,000 nucleotide monomer units and wherein the prefix oligo- refers to a nucleic acid containing 2 to about 200 nucleotide monomer units.

[0181] Nucleotide: The term “nucleotide” as used herein refers to a monomeric unit of a polynucleotide that consists of a heterocyclic base, a sugar, and one or more internucleotidic linkages. The naturally occurring bases (guanine, (G), adenine, (A), cytosine, (C), thymine, (T), and uracil (U)) derivatives of purine or pyrimidine, though it should be understood that naturally and non-naturally occurring base analogs are also included. The naturally occurring sugar is the pentose (five-carbon sugar) deoxyribose (which forms DNA) or ribose (which forms RNA), though it should be understood that naturally and non-naturally occurring sugar analogs are also included. Nucleotides are linked via internucleotidic linkages to form nucleic acids, or polynucleotides. Many internucleotidic linkages are known in the art (such as, though not limited to, phosphate, phosphorothioates, boran ° phosphates and the like). Artificial nucleic acids include PNAs (peptide nucleic acids), phosphotriesters, phosphorothioates, H-phosphonates, phosphoramidates, boranophosphates, methylphosphonates, phosphonoacetates, thiophosphonoacetates and other variants of the phosphate backbone of native nucleic acids, such as those described herein. In some embodiments, a natural nucleotide comprises a naturally occurring base, sugar and internucleotidic linkage. As used herein, the term “nucleotide” also encompasses structural analogs used in lieu of natural or naturally-occurring nucleotides, such as modified nucleotides and nucleotide analogs.

[0182] Modified nucleotide: The term “modified nucleotide” includes any chemical moiety which differs structurally from a natural nucleotide but is capable of performing at least one function of a natural nucleotide. In some embodiments, a modified nucleotide comprises a modification at a sugar, base and/or internucleotidic linkage. In some embodiments, a modified nucleotide comprises a modified sugar, modified nucleobase and/or modified internucleotidic linkage. In some embodiments, a modified nucleotide is capable of at least one function of a nucleotide, forming a subunit in a polymer capable of base-pairing to a nucleic acid comprising an at least complementary sequence of bases.

[0183] Analog: The term“analog” means any functional analog wherein a chemical moiety which differs structurally from a reference chemical moiety or class of moieties, but which is capable of performing at least one function of such a reference chemical moiety or class of moieties. As non-limiting examples, a nucleotide analog differs structurally from a nucleotide but performs at least one function of a nucleotide; a nucleobase analog differs structurally from a nucleobase but performs at least one function of a nucleobase; etc.

[0184] Nucleoside: The term “nucleoside” refers to a moiety wherein a nucleobase or a modified nucleobase is covalently bound to a sugar or modified sugar.

[0185] Modified nucleoside: The term “modified nucleoside” refers to a moiety derived from or chemically similar to a natural nucleoside, but which comprises a chemical modification which differentiates it from a natural nucleoside. Non-limiting examples of modified nucleosides include those which comprise a modification at the base and/or the sugar. Non-limiting examples of modified nucleosides include those with a 2′ modification at a sugar. Non-limiting examples of modified nucleosides also include abasic nucleosides (which lack a nucleobase). In some embodiments, a modified nucleoside is capable of at least one function of a nucleoside, e.g., forming a moiety in a polymer capable of base-pairing to a nucleic acid comprising an at least complementary sequence of bases.

[0186] Nucleoside analog: The term “nucleoside analog” refers to a chemical moiety which is chemically distinct from a natural nucleoside, but which is capable of performing at least one function of a nucleoside. In some embodiments, a nucleoside analog comprises an analog of a sugar and/or an analog of a nucleobase. In some embodiments, a modified nucleoside is capable of at least one function of a nucleoside, e.g., forming a moiety in a polymer capable of base-pairing to a nucleic acid comprising a complementary sequence of bases.

[0187] Sugar: The term “sugar” refers to a monosaccharide or polysaccharide in closed and/or open form. In some embodiments, sugars are monosaccharides. In some embodiments, sugars are polysaccharides. Sugars include, but are not limited to, ribose, deoxyribose, pentofuranose, pentopyranose, and hexopyranose moieties. As used herein, the term “sugar” also encompasses structural analogs used in lieu of conventional sugar molecules, such as glycol, polymer of which forms the bath bone of the nucleic acid analog, glycol nucleic acid (“GNA”), etc. As used herein, the term “sugar” also encompasses structural analogs used in lieu of natural or naturally-occurring nucleotides, such as modified sugars and nucleotide sugars.

[0188] Modified sugar: The term “modified sugar” refers to a moiety that can replace a sugar. A modified sugar mimics the spatial arrangement, electronic properties, or some other physicochemical property of a sugar.

[0189] Nucleobase: The term “nucleobase” refers to the parts of nucleic acids that are involved in the hydrogen-bonding that binds one nucleic acid strand to another complementary strand in a sequence specific manner. The most common naturally-occurring nucleobases are adenine (A), guanine (G), uracil (U), cytosine (C), and thymine (T). In some embodiments, the naturally-occurring nucleobases are modified adenine, guanine, uracil, cytosine, or thymine. In some embodiments, the naturally-occurring nucleobases are methylated adenine, guanine, uracil, cytosine, or thymine. In some embodiments, a nucleobase is a “modified nucleobase.” e.g. a nucleobase other than adenine (A), guanine (G), uracil (L), cytosine (C), and thy mine (T). In some embodiments, the modified nucleobases are methylated adenine, guanine, uracil, cytosine, or thymine. In some embodiments, the modified nucleobase mimics the spatial arrangement, electronic properties, or some other physicochemical property of the nucleobase and retains the property of hydrogen-bonding that binds one nucleic acid strand to another in a sequence specific manner. In some embodiments, a modified nucleobase can pair with all of the five naturally occurring bases (uracil, thymine, adenine, cytosine, or guanine) without substantially affecting the melting behavior, recognition by intracellular enzymes or activity of the oligonucleotide duplex. As used herein, the term “nucleobase” also encompasses structural analogs used in lieu of natural or naturally occurring nucleotides, such as modified nucleobases and nucleobase analogs.

[0190] Modified nucleobase: The terms “modified nucleobase”, “modified base” and the like refer to a chemical moiety which is chemically distinct from a nucleobase, but which is capable of performing at least one function of a nucleobase. In some embodiments, a modified nucleobase is a nucleobase which comprises a modification. In some embodiments, a modified nucleobase is capable of at least one function of a nucleobase, forming a moiety in a polymer capable of base-pairing to a nucleic acid comprising an at least complementary sequence of bases.

[0191] 3′-end cap: The term “3′-end cap” refers to a non-nucleotidic chemical moiety bound to the 3′-end of a PNPLA3 oligonucleotide, e.g., a RNAi agent. In some embodiments, a 3′-end cap replaces a 3′-terminal dinucleotide. In some embodiments, a 3′-end cap of a PNPLA3 oligonucleotide performs at least one of the following functions: allowing RNA interference directed by the oligonucleotide, protecting the oligonucleotide from degradation or reducing the amount or rate of degradation of the oligonucleotide (e.g., by nucleases), reducing the off-target effects of a sense strand, or increasing the activity, duration or efficacy of RNA interference directed by the oligonucleotide. By describing a 3′-end cap as “non-nucleotidic”, it is meant that a 3′-end cap is not a nucleotidic moiety, or oligonucleotide moiety, connected to a sugar moiety of the rest of an PNPLA3 oligonucleotide as it would do if it is part of a PNPLA3 oligonucleotide chain. Certain example 3′-end caps are described herein. A person having ordinary skill understands that others 3′-end caps known in the art can be utilized in accordance in the present disclosure.

[0192] Blocking group: The term “blocking group” refers to a group that masks the reactivity of a functional group. The functional group can be subsequently unmasked by removal of the blocking group. In some embodiments, a blocking group is a protecting group.

[0193] Moiety: The term “moiety” refers to a specific segment or functional group of a molecule. Chemical moieties are often recognized chemical entities embedded in or appended to a molecule.

[0194] Solid support: The term “solid support” refers to any support which enables synthesis of nucleic acids. In some embodiments, the term refers to a glass or a polymer, that is insoluble in the media employed in the reaction steps performed to synthesize nucleic acids, and is derivatized to comprise reactive groups. In some embodiments, the solid support is Highly Cross-linked Polystyrene (HCP) or Controlled Pore Glass (CPG). In some embodiments, the solid support is Controlled Pore Glass (CPG). In some embodiments, the solid support is hybrid support of Controlled Pore Glass (CPG) and Highly Cross-linked Polystyrene (HCP).

[0195] Linker or Linking moiety: The terms “linker”, “linking moiety” and the like refer to any chemical moiety which connects one chemical moiety to another. In some embodiments, a linker is a moiety which connects one oligonucleotide to another oligonucleotide in a multimer. In some embodiments, a linker is a moiety optionally positioned between the terminal nucleoside and the solid support or between the terminal nucleoside and another nucleoside, nucleotide, or nucleic acid.

[0196] Gene: The terms “gene,” “recombinant gene” and “gene construct” as used herein, refer to a DNA molecule, or portion of a DNA molecule, that encodes a protein or a portion thereof. The DNA molecule can contain an open reading frame encoding the protein (as exon sequences) and can further include intron sequences. The term “intron” as used herein, refers to a DNA sequence present in a given gene which is not translated into protein and is found in some, but not all cases, between exons. It can be desirable for the gene to be operably linked to, (or it can comprise), one or more promoters, enhancers, repressors and/or other regulatory sequences to modulate the activity or expression of the gene, as is well known in the art.

[0197] Complementary DNA: As used herein, a “complementary DNA” or “cDNA” includes recombinant polynucleotides synthesized by reverse transcription of mRNA and from which intervening sequences (introns) have been removed.

[0198] Oligonucleotide: The term “oligonucleotide” refers to a polymer or oligomer of nucleotides, and may contain any combination of natural and non-natural nucleobases, sugars, and internucleotidic linkages.

[0199] Oligonucleotides can be single-stranded or double-stranded. As used herein, the term “oligonucleotide strand” encompasses a single-stranded oligonucleotide. A single-stranded oligonucleotide can have double-stranded regions (formed by two portions of the single-stranded oligonucleotide) and a double-stranded oligonucleotide, which comprises two oligonucleotide chains, can have single-stranded regions for example, at regions where the two oligonucleotide chains are not complementary to each other. In some embodiments, oligonucleotides are capable of directing a decrease in the expression and/or level of a target gene or its gene product. In some embodiments, oligonucleotides are capable of directing a decrease in the expression and/or level of a target gene or its gene product via RNA interference. In some embodiments, oligonucleotides are capable of directing a decrease in the expression and/or level of a target gene or its gene product via a biochemical mechanism which does not involve RNA interference or RISC (including, but not limited to, RNaseH-mediated knockdown or steric hindrance of gene expression). In some embodiments, oligonucleotides are capable of directing a decrease in the expression and/or level of a target gene or its gene product via. RNA interference and/or RNase H-mediated knockdown. Example oligonucleotides include, but are not limited to structural genes, genes including control and termination regions, self-replicating systems such as viral or plasmid DNA, single-stranded and double-stranded RNAi agents and other RNA interference reagents (RNAi agents or iRNA agents), shRNA, antisense oligonucleotides, ribozymes, microRNAs, microRNA mimics, supermirs, aptamers, antimirs, antagomirs, UI adaptors, triplex-forming oligonucleotides, G-quadruplex oligonucleotides, RNA activators, immunostimulatory oligonucleotides, and decoy oligonucleotides.

[0200] Double-stranded and single-stranded oligonucleotides that are effective in inducing RNA interference are also referred to as a RNAi agent or iRNA agent, herein. In some embodiments, these RNA interference inducing oligonucleotides associate with a cytoplasmic multi-protein complex known as RNAi-induced silencing complex (RISC). In many embodiments, double-stranded RNAi agents are sufficiently long that they can be cleaved by an endogenous molecule, by Dicer, to produce smaller oligonucleotides that can enter the RISC machinery and participate in RISC mediated cleavage and/or translation suppression of a target sequence, e.g. a target mRNA sequence.

[0201] Oligonucleotides of the present disclosure can be of various lengths. In particular embodiments, oligonucleotides can range from about 2 to about 200 nucleotides in length. In various related embodiments, oligonucleotides, single-stranded, double-stranded, and triple-stranded, can range in length from about 4 to about 10 nucleotides, from about 10 to about 50 nucleotides, from about 20 to about 50 nucleotides, from about 15 to about 30 nucleotides, or from about 20 to about 30 nucleotides in length. In some embodiments, a PNPLA3 oligonucleotide is from about 10 to about 40 nucleotides in length. In some embodiments, a PNPLA3 oligonucleotide is from about 9 to about 39 nucleotides in length. In some embodiments, the oligonucleotide is at least 4 nucleotides in length. In some embodiments, the oligonucleotide is at least 5 nucleotides in length. In some embodiments, the oligonucleotide is at least 6 nucleotides in length. In some embodiments, the oligonucleotide is at least 7 nucleotides in length. In some embodiments, the oligonucleotide is at least 8 nucleotides in length. In some embodiments, the oligonucleotide is at least 9 nucleotides in length. In some embodiments, the oligonucleotide is at least 10 nucleotides in length. In some embodiments, the oligonucleotide is at least 11 nucleotides in length. In some embodiments, the oligonucleotide is at least 12 nucleotides in length. In some embodiments, the oligonucleotide is at least 15 nucleotides in length. In some embodiments, the oligonucleotide is at least 20 nucleotides in length. In some embodiments, the oligonucleotide is at least 25 nucleotides in length. In some embodiments, the oligonucleotide is at least 30 nucleotides in length. In some embodiments, the oligonucleotide is a duplex of complementary strands of at least 18 nucleotides in length. In some embodiments, the oligonucleotide is a duplex of complementary strands of at least 21 nucleotides in length. In some embodiments, each nucleotide counted in a length independently comprises an optionally substituted nucleobase selected from adenine, cytosine, guanosine, thymine, and uracil.

[0202] Internucleotidic linkage: As used herein, the phrase “internucleotidic linkage” refers generally to a linkage linking nucleoside units of a PNPLA3 oligonucleotide or a nucleic acid. In some embodiments, an internucleotidic linkage is a phosphodiester linkage, as found in naturally occurring DNA and RNA molecules (natural phosphate linkage). In some embodiments, the term “internucleotidic linkage” includes a modified internucleotidic linkage. In some embodiments, an internucleotidic linkage is a “modified internucleotidic linkage” wherein each oxygen atom of the phosphodiester linkage is optionally and independently replaced by an organic or inorganic moiety. In some embodiments, such an organic or inorganic moiety is selected from but not limited to ═S, ═Se, ═NR′, —SR′, —SeR′, B(R′)₂, —S—, —Se—, and —N(R′)—, wherein each R′ is independently as defined and described in the present disclosure. In some embodiments, an internucleotidic linkage is a phosphodiester linkage, phosphorothioate diester linkage

[chemical structure]

or modified phosphorothioate nester linkage.

[0203] It is understood by a person of ordinary skill in the art that an internucleotidic linkage may exist as an anion or cation at a given pH due to the existence of acid or base moieties in the linkage.

[0204] In some embodiments, “All-(Rp)” or “All-(Sp)” is used to indicate that all chiral linkage phosphorus atoms in oligonucleotide have the same Rp or Sp configuration, respectively.

[0205] Oligonucleotide type: As used herein, the phrase “oligonucleotide type” is used to define a PNPLA3 oligonucleotide that has a particular base sequence, pattern of backbone linkages (i.e., pattern of internucleotidic linkage types, for example, phosphate, phosphorothioate, etc.), pattern of backbone chiral centers (i.e. pattern of linkage phosphorus stereochemistry (Rp/Sp)), and pattern of backbone phosphorus modifications (e.g., pattern of “-XLR¹” groups in formula I). In some embodiments, oligonucleotides of a common designated “type” are structurally identical to one another.

[0206] One of skill in the art will appreciate that synthetic methods of the present disclosure provide for a degree of control during the synthesis of a PNPLA3 oligonucleotide strand such that each nucleotide unit of the oligonucleotide strand can be designed and/or selected in advance to have a particular stereochemistry at the linkage phosphorus and/or a particular modification at the linkage phosphorus, and/or a particular base, and/or a particular sugar. In some embodiments, a PNPLA3 oligonucleotide strand is designed and/or selected in advance to have a particular combination of stereocenters at the linkage phosphorus. In some embodiments, an PNPLA3 oligonucleotide strand is designed and/or determined to have a particular combination of modifications at the linkage phosphorus. In some embodiments, a PNPLA3 oligonucleotide strand is designed and/or selected to have a particular combination of bases. In some embodiments, a PNPLA3 oligonucleotide strand is designed and/or selected to have a particular combination of one or more of the above structural characteristics. In some embodiments, the present disclosure provides compositions comprising or consisting of a plurality of oligonucleotide molecules (e.g., chirally controlled oligonucleotide compositions). In some embodiments, all such molecules are of the same type (i.e., are structurally identical to one another). In many embodiments, however, provided compositions comprise a plurality of oligonucleotides of different types, typically in pre-determined relative amounts.

[0207] Chiral control: As used herein, “chiral control” refers to control of the stereochemical designation of a chiral linkage phosphorus in a chiral internucleotidic linkage within a PNPLA3 oligonucleotide. In some embodiments, a control is achieved through a chiral element that is absent from the sugar and base moieties of a PNPLA3 oligonucleotide, for example, in some embodiments, a control is achieved through use of one or more chiral auxiliaries during oligonucleotide preparation as exemplified in the present disclosure, which chiral auxiliaries often are part of chiral phosphoramidites used during oligonucleotide preparation. In contrast to chiral control, a person having ordinary skill in the art appreciates that conventional oligonucleotide synthesis which does not use chiral auxiliaries cannot control stereochemistry at a chiral internucleotidic linkage if such conventional oligonucleotide synthesis is used to form the chiral internucleotidic linkage. In some embodiments, the stereochemical designation of each chiral linkage phosphorus in a chiral internucleotidic linkage within a PNPLA3 oligonucleotide, is controlled.

[0208] Chirally controlled oligonucleotide composition: The terms “chirally controlled oligonucleotide composition”, “chirally controlled nucleic acid composition”, and the like, as used herein, refers to a composition that comprises a plurality of oligonucleotides (or nucleic acids) which share 1) a common base sequence, 2) a common pattern of backbone linkages, and 3) a common pattern of backbone phosphorus modifications, wherein the plurality of oligonucleotides (or nucleic acids) share the same stereochemistry at one or more chiral internucleotidic linkages (chirally controlled internucleotidic linkages), and the level of the plurality of oligonucleotides (or nucleic acids) in the composition is pre-determined (e.g., through chirally controlled oligonucleotide preparation to form one or more chiral internucleotidic linkages). In some embodiments, about 1%-100%, (e.g., about 5%-100%, 10%-100%, 20%-100%, 30%-100%, 40%-100%, 50%-100%, 60%-100%, 70%-100%, 80-100%, 90-100%, 95-100%, 50%-90%, or about 5%, 10%, 20%, 30%, 40%, 50%, 60%, 70%, 80%, 85%, 90%, 91%, 92%, 93%, 94%, 95%, 96%, 97%, 98%, or 99%, or at least 5%, 10%, 20%, 30%, 40%, 50%, 60%, 70%, 80%, 85%, 90%, 91%, 92%. 93%, 94%, 95%, 96%, 97%, 98%, or 99%) of all oligonucleotides in a chirally controlled oligonucleotide composition are oligonucleotides of the plurality. In some embodiments, about 1%-100%, (e.g., about 5%-100%, 10%-100%, 20%-100%, 30%400%, 40%-1100%, 50%-100%, 60%-100%, 70%-100%, 80-100%, 90-100%, 95-100%, 50%-90%, or about 5%, 10%, 20%, 30%, 40%, 50%, 60%, 70%, 80%, 85%, 90%, 91%, 92%, 93%, 94%, 95%, 96%, 97%, 98%, or 99%, or at least 5%, 10%, 20%, 30%, 40%, 50%, 60%, 70%, 80%, 85%, 90%, 91%, 92%, 93%, 94%, 95%, 96%, 97%, 98%, or 99%) of all oligonucleotides in a chirally controlled oligonucleotide composition that share the common base sequence are oligonucleotides of the plurality. In some embodiments, about 1%400%, (e.g., about 5%-100%, 10%-100%, 20%-100%, 30%-100%, 40%-100%, 50%-100%, 60%-100%, 70%-100%, 80-100%, 90-100%, 95-100%, 50%-90%, or about 5%, 10%, 20%, 30%, 40%, 50%, 60%, 70%, 80%, 85%, 90%, 91%, 92%, 93%, 94%, 95%, 96%, 97%, 98%, or 99%, or at least 5%, 10%, 20%, 30%, 40%, 50%. 60%, 70%, 80%, 85%, 90%, 91%. 92%, 93%, 94%. 95%, 96%, 97%, 98%, or 99%) of all oligonucleotides in a chirally controlled oligonucleotide composition that share the common base sequence, the common pattern of backbone linkages, and the common pattern of backbone phosphorus modifications are oligonucleotides of the plurality. In some embodiments, a predetermined level is be about 1%-100%, (e.g., about 5%-100%, 10%-100%, 20%-100%, 30%-100%, 40%-100%, 50%-100%, 60%-100%, 70%-100%, 80-100%, 90-100%, 95-100%, 50%-90%, or about 5%, 10%, 20%, 30%, 40%, 50%, 60%, 70%, 80%, 85%, 90%, 91%, 92%, 93%, 94%, 95%, 96%, 97%, 98%, or 99%, or at least 5%, 10%, 20%, 30%, 40%, 50%. 60%, 70%, 80%. 85%, 90%, 91%, 92%, 93%, 94%, 95%, 96%, 97%, 98%, or 99%) of all oligonucleotides in a composition, or of all oligonucleotides in a composition that share a common base sequence (e.g., of a plurality of oligonucleotide or a PNPLA3 oligonucleotide type), or of all oligonucleotides in a composition that share a common base sequence, a common pattern of backbone linkages, and a common pattern of backbone phosphorus modifications are oligonucleotides of the plurality, or of all oligonucleotides in a composition that share a common base sequence, a common patter of base modifications, a common pattern of sugar modifications, a common pattern of internucleotidic linkage types, and/or a common pattern of internucleotidic linkage modifications. In some embodiments, the plurality of oligonucleotides share the same stereochemistry at about 1-50 (e.g., about 1-10, 1-20.5-10, 5-20, 10-15, 10-20, 10-25, 10-30, or about 1, 2, 3, 4, 5, 6, 7, 8, 9, 10, 11, 12, 13, 14, 15, 16, 17, 18, 19, or 20, or at least 1, 2, 3, 4, 5, 6, 7, 8, 9, 10, 11, 12, 13, 14, 15, 16, 17, 18, 19, or 20) chiral internucleotidic linkages. In some embodiments, the plurality of oligonucleotides share the same stereochemistry at about 1%400% (e.g., about 5%400%, 10%-100%, 20%-100%, 30%-100%, 40%-100%, 50%-100%, 60%-100%, 70%-100%, 80-100%, 90-100%, 95-100%, 50%-90%, about 5%, 10%, 15%, 20%, 25%, 30%, 35%, 40%, 45%, 50%, 55%, 60%, 65%, 70%, 75%, 80%, 85%, 90%, 95%, or 100%, or at least 5%, 10%, 15%, 20%, 25%, 30%, 35%, 40%, 45%, 50%, 55%, 60%, 65%, 70%, 75%, 80%, 85%, 90%, 95%, or 99%) of chiral internucleotidic linkages. In some embodiments, each chiral internucleotidic linkage is a chiral controlled internucleotidic linkage, and the composition is a completely chirally controlled oligonucleotide composition. In some embodiments, not all chiral internucleotidic linkages are chiral controlled internucleotidic linkages, and the composition is a partially chirally controlled oligonucleotide composition. In some embodiments, a chirally controlled oligonucleotide composition comprises predetermined levels of individual oligonucleotide or nucleic acids types. For instance, in some embodiments a chirally controlled oligonucleotide composition comprises one oligonucleotide type. In some embodiments, a chirally controlled oligonucleotide composition comprises more than one oligonucleotide type. In some embodiments, a chirally controlled oligonucleotide composition comprises multiple oligonucleotide types. In some embodiments, a chirally controlled oligonucleotide composition is a composition of oligonucleotides of a oligonucleotide type, which composition comprises a predetermined level of a plurality of oligonucleotides of the oligonucleotide type.

[0209] Chirally pure: as used herein, the phrase “chirally pure” is used to describe the relative amount of a PNPLA3 oligonucleotide, e.g., a single-stranded RNAi agent, in which all of the oligonucleotides exist in a single diastereomeric form with respect to the linkage phosphorus.

[0210] Chirally uniform: as used herein, the phrase “chirally uniform” is used to describe a PNPLA3 oligonucleotide molecule or type in which all nucleotide units have the same stereochemistry at the linkage phosphorus. For instance, a PNPLA3 oligonucleotide whose nucleotide units all have Rp stereochemistry at the linkage phosphorus is chirally uniform. Likewise, an PNPLA3 oligonucleotide whose nucleotide units all have Sp stereochemistry at the linkage phosphorus is chirally uniform.

[0211] Predetermined: By predetermined (or pre-determined) is meant deliberately selected, for example as opposed to randomly occurring or achieved without control. Those of ordinary skill in the art, reading the present specification, will appreciate that the present disclosure provides technologies that permit selection of particular chemistry and/or stereochemistry features to be incorporated into oligonucleotide compositions, and further permits controlled preparation of oligonucleotide compositions having such chemistry and/or stereochemistry features. Such provided compositions are “predetermined” as described herein. Compositions that may contain certain oligonucleotides because they happen to have been generated through a process that are not controlled to intentionally generate the particular chemistry and/or stereochemistry features is not a “predetermined” composition. In some embodiments, a predetermined composition is one that can be intentionally reproduced (e.g., through repetition of a controlled process). In some embodiments, a predetermined level of a plurality of oligonucleotides in a composition means that the absolute amount, and/or the relative amount (ratio, percentage, etc.) of the plurality of oligonucleotides in the composition is controlled. In some embodiments, a predetermined level of a plurality of oligonucleotides in a composition is achieved through chirally controlled oligonucleotide preparation.

[0212] Linkage phosphorus: as defined herein, the phrase “linkage phosphorus” is used to indicate that the particular phosphorus atom being referred to is the phosphorus atom present in the internucleotidic linkage, which phosphorus atom corresponds to the phosphorus atom of a phosphodiester of an internucleotidic linkage as occurs in naturally occurring DNA and RNA. In some embodiments, a linkage phosphorus atom is in a modified internucleotidic linkage, wherein each oxygen atom of a phosphodiester linkage is optionally and independently replaced by an organic: or inorganic moiety. In some embodiments, a linkage phosphorus atom is P^{L} of Formula I. In some embodiments, a linkage phosphorus atom is chiral.

[0213] P-modification: as used herein, the term “P-modification” refers to any modification at the linkage phosphorus other than a stereochemical modification. In some embodiments, a P-modification comprises addition, substitution, or removal of a pendant moiety covalently attached to a linkage phosphorus. In some embodiments, the “P-modification” is —X-L-R¹ wherein each of X, L and R¹ is independently as defined and described in the present disclosure.

[0214] For purposes of this disclosure, the chemical elements are identified in accordance with the Periodic Table of the Elements, CAS version, Handbook of Chemistry and Physics, 67th Ed., 1986-87, inside cover.

[0215] The methods and structures described herein relating to compounds and compositions of the disclosure also apply to the pharmaceutically acceptable acid or base addition salts and all stereoisomeric forms of these compounds and compositions.

### BRIEF DESCRIPTION OF THE DRAWINGS

[0216] FIG. 1. FIG. 1, including FIGS. 1A to 1L, presents cartoons of various sRNAi formats and hybrid formats.

[0217] FIG. 2. FIG. 2 presents cartoons of various antisense oligonucleotide formats.

[0218] FIG. 3. FIG. 3A shows example multimer formats. Oligonucleotides can be joined directly and; or through linkers. As illustrated, a multimer can comprise oligonucleotide monomers of the same or different structures/types. In some embodiments, a monomer of a, multimer is an ssRNAi agent. In some embodiments, a monomer of a multimer is a RNase H-dependent antisense oligonucleotide (ASO). Monomers can be joined through various positions, for example, the 5′-end, the 3′-end, or positions in between. FIG. 3B shows example chemistry approaches for joining monomers, which monomers may perform their functions through various pathways, to form multimers.

### DETAILED DESCRIPTION OF CERTAIN EMBODIMENTS

[0219] Synthetic oligonucleotides provide useful molecular tools in a wide variety of applications. For example, oligonucleotides are useful in therapeutic, diagnostic, research, and new nanomaterials applications. The use of naturally occurring nucleic acids (e.g., unmodified DNA or RNA) is limited, for example, by their susceptibility to endo- and exo-nucleases. As such, various synthetic counterparts have been developed to circumvent these shortcomings. These include synthetic oligonucleotides that contain chemical modifications, e.g., base modifications, sugar modifications, backbone modifications, etc., which, among other things, render these molecules less susceptible to degradation and improve other properties of oligonucleotides. From a structural point of view, modifications to internucleotide, phosphate linkages can introduce chirality, and certain properties of oligonucleotides may be affected by configurations of phosphorus atoms that form the backbone of oligonucleotides. For example, in vitro studies have shown that properties of antisense oligonucleotides, such as binding affinity, sequence specific binding to complementary RNA, stability to nucleases, are affected by, inter alia, chirality of backbone phosphorus atoms.

[0220] Among other things, the present disclosure encompasses the recognition that structural elements of oligonucleotides, such as chemical modifications (e.g., modifications of sugar, base, and/or internucleotidic linkages) or patterns thereof, conjugation to lipids or other moieties, and/or stereochemistry [e.g., stereochemistry of backbone chiral centers (chiral internucleotidic linkages), and/or patterns thereof], can have significant impact on properties and activities (e.g., stability, specificity, selectivity, activities to reduce levels of products (transcripts and/or protein) of target genes, etc.). In some embodiments, oligonucleotide properties can be adjusted by optimizing chemical modifications (modifications of base, sugar, and/or internucleotidic linkage moieties), patterns of chemical modifications, stereochemistry and/or patterns of stereochemistry.

[0221] In some embodiments, the present disclosure demonstrates that oligonucleotide compositions comprising oligonucleotides with controlled structural elements, e.g., controlled chemical modifications and/or controlled backbone stereochemistry patterns, provide unexpected properties and activities, including but not limited to those described herein. In some embodiments, provided compositions comprising oligonucleotides having chemical modifications (e.g., base modifications, sugar modification, internucleotidic linkage modifications, etc.) or patterns thereof have improved properties and activities. Non-limiting examples of such improved properties include: directing a decrease in the expression and/or level of a target gene or its gene product; and/or directing RNA interference; and/or directing RNase H-mediated knockdown. In some embodiments, the present disclosure provides technologies (e.g., oligonucleotides, compositions, methods, etc.) for single-stranded RNAi. In some embodiments, a provided oligonucleotide is a ssRNAi agent.

[0222] In some embodiments, RNA interference is reportedly a post-transcriptional, targeted gene-silencing technique that uses an RNAi agent to target a RNA, e.g., a gene transcript such as a messenger RNA (mRNA), comprising a sequence complementary to the RNAi agent, for cleavage mediated by the RISC (RNA-induced silencing complex) pathway. In nature, a type of RNAi reportedly occurs when ribonuclease III (Dicer) cleaves a long dsRNA (double-stranded RNA) (e.g., a foreign dsRNA introduced into a mammalian cell) into shorter fragments called siRNAs. siRNAs (small interfering RNAs or short inhibitory RNAs) are typically about 21 to 23 nucleotides long and comprise about 19 base pair duplexes. The smaller RNA segments then reportedly mediate the degradation of the target mRNA. The RNAi response also reportedly features an endonuclease complex, commonly referred to as an RNA-induced silencing complex (RISC), which directs cleavage of single-stranded mRNA complementary to the antisense strand of the siRNA. Cleavage of the target RNA reportedly takes place in the middle of the region complementary to the antisense strand of the siRNA duplex. The use of the RNAi agent to a target transcript reportedly results in a decrease of gene activity, level and/or expression, e.g., a “knock-down” or “knock-out” of the target gene or target sequence. Artificial siRNAs are useful both as therapeutics and for experimental use.

[0223] In one aspect, an RNA interference agent includes a single stranded RNA that interacts with a target RNA sequence to direct the cleavage of the target RN A. Without wishing to be bound by theory, long double stranded RNA introduced into plants and invertebrate cells is reportedly broken down into siRNA by a Type III endonuclease known as Dicer (Sharp et al., Genes Dev. 2001, 15:485). Dicer, a ribonuclease-III-like enzyme, reportedly processes the dsRNA into 19-23 base pair short interfering RNAs with characteristic two base 3′ overhangs (Bernstein, et al., (2001) Nature 409:363). The siRNAs are reportedly then incorporated into an RNA-induced silencing complex (RISC) where one or more helicases unwind the siRNA duplex, enabling the complementary antisense strand to guide target recognition (Nykanen, et al., (2001) Cell 107:309). Upon binding to the appropriate target mRNA, one or more endonucleases within the RISC cleaves the target to induce silencing (Elbashir, et al., (2001) Genes Dev. 15: 188). Thus, in one aspect the disclosure relates to a single stranded RNA that promotes the formation of a RISC complex to effect silencing of a target gene.

[0224] In some embodiments, a suitable RNAi agent can be selected by any processes known in the art or conceivable by one of ordinary skill in the art in accordance with the present disclosure. For example, the selection criteria can include one or more of the following steps: initial analysis of the tar et gene sequence and design of RNAi agents; this design can take into consideration sequence similarity across species (human, cynomolgus, mouse, etc.) and dissimilarity to other (non-target) genes; screening of RNAi agents in vitro (e.g., at 10 nM in cells expressing the target transcript); determination of EC50 or IC50 in cells; determination of viability of cells treated with RNAi agents, wherein it is desired, in some embodiments, that the RNAi agent to the target not inhibit the viability of these cells; testing with human PBMC (peripheral blood mononuclear cells), e.g., to test levels of TNF-alpha to estimate immunogenicity, wherein immunostimulatory sequences are usually less desired; testing in human whole blood assay, wherein fresh human blood is treated with an RNAi agent and cytokine/chemokine levels are determined [e.g., TNF-alpha (tumor necrosis factor-alpha) and/or MCP1 (monocyte chemotactic protein 1)], wherein immunostimulatory sequences are usually less desired; determination of gene knockdown in vivo using cells or tumors in test animals; and optimization of specific modifications of the RNAi agents.

[0225] The so-called canonical siRNA structure is reportedly a double-stranded RNA molecule, wherein each strand is about 21 nucleotides long. The two strands are reportedly an antisense (or “guide”) strand, which recognizes and binds to a complementary sequence in the target transcript, and a sense (or “passenger”) strand, which is complementary to the antisense strand. The sense and antisense strands are reportedly largely complementary, typically forming two 3′ overhangs of 2 nucleotides on both ends.

[0226] While a canonical siRNA structure is reportedly double-stranded, RNAi agent can also be single-stranded. In some embodiments, a single-stranded RNAi agent corresponds to an antisense strand of a double-stranded siRNA, and the single-stranded RNAi agent lacks a corresponding passenger strand.

[0227] However, it has been reported that not all tested structural elements for single-stranded RNAi agents are effective; introduction of some structural elements into a PNPLA3 oligonucleotide can reportedly interference with single-stranded RNA interference activity.

[0228] In some embodiments, the present disclosure provides oligo nucleotides and compositions useful as RNAi agent. In some embodiments, the present disclosure provides oligonucleotides and compositions useful as single-stranded RNAi agent. The present disclosure, among other things, provides novel structures of single-stranded oligonucleotides capable of directing RNA interference. Without wishing to be bound by any particular theory, this disclosure notes that single-stranded RNAi agents have advantages over double-stranded RNAi agents. For example, single-stranded RNAi agents have a lower cost of goods, as the construction of only one strand is required. Additionally or alternatively, only one strand (the antisense strand) is administered to target a target transcript. A source of off-target effects directed by dsRNA is loading of the sense strand into RISC and binding to and knockdown of undesired targets (Jackson et al. 2003 Nat. Biotech, 21: 635-637), a single-stranded RNAi agent can elicit fewer off-target effects than a corresponding double-stranded RNAi agent. In addition, some single-stranded RNAi agents, including some disclosed herein, can target particular sequences which have not previously been successfully targeted with double-stranded RNAi agents (for example, they can reduce levels of the sequences, and/or products (transcripts and/or proteins) of the sequences, significantly more than double-stranded RNAi agents). The present disclosure, among other things, provides novel formats (modifications, stereochemistry, combinations thereof, etc.) for oligonucleotides which can direct single-stranded RNA interference.

### Oligonucleotides

[0229] In some embodiments, provided oligonucleotides can direct a decrease in the expression and/or level of a target gene or its gene product. In some embodiments, provided oligonucleotides can direct a decrease in levels of target products. In some embodiments, provided oligonucleotide can reduce levels of transcripts of target genes. In some embodiments, provided oligonucleotide can reduce levels of mRNA of target genes. In some embodiments, provided oligonucleotide can reduce levels of proteins encoded by target genes. In some embodiments, provided oligonucleotides can direct a decrease in the expression and/or level of a target gene or its gene product via RNA interference. In some embodiments, provided oligonucleotides can direct a decrease in the expression and/or level of a target gene or its gene product via a biochemical mechanism which does not involve RNA interference or RISC (including, but not limited to, RNaseH-mediated knockdown or steric hindrance of gene expression). In some embodiments, provided oligonucleotides can direct a decrease in the expression and/or level of a target gene or its gene product via RNA interference and/or RNase H-mediated knockdown. In some embodiments, provided oligonucleotides can direct a decrease in the expression and/or level of a target gene or its gene product by sterically blocking translation after binding to a target gene mRNA, and/or by altering or interfering with mRNA splicing and/or exon inclusion or exclusion. In some embodiments, provided oligonucleotides comprise one or more structural elements described herein or known in the art in accordance with the present disclosure, e.g., base sequences; modifications; stereochemistry; patterns of internucleotidic linkages; patterns of backbone linkages; patterns of backbone chiral centers; patterns of backbone phosphorus modifications; additional chemical moieties, including but not limited to, on e or more targeting moieties, lipid moieties, and/or carbohydrate moieties, etc.; seed regions; post-seed regions; 5′-end structures; 5′-end regions; 5′ nucleotide moieties; 3′-end regions; 3′-terminal dinucleotides; 3′-end caps; etc. In some embodiments, a seed region of a PNPLA3 oligonucleotide is or comprises the second to eighth, second to seventh, second to sixth, third to eighth, third to seventh, third to seven, or fourth to eighth or fourth to seventh nucleotides, counting from the 5′ end; and the post-seed region of the oligonucleotide is the region immediately 3′ to the seed region, and interposed between the seed region and the 3′ end region.

[0230] In some embodiments, a provided composition comprises a PNPLA3 oligonucleotide. In some embodiments, a provided composition comprises one or more lipid moieties, one or more carbohydrate moieties (unless otherwise specified, other than sugar moieties of nucleoside units that form oligonucleotide chain with internucleotidic linkages), and/or one or more targeting components.

[0231] In some embodiments, where presence and/or activity of a particular allele (and/or its one or more products (e.g., RNA and/or protein products)) (a disease-associated allele) is associated (e.g., correlated) with presence, incidence and/or severity of one or more diseases and/or conditions, a different allele of the same sequence (e.g. gene) exists and is not so associated, or is associated to a lesser extent (e.g., shows less significant, or statistically insignificant correlation). In some such embodiments, oligonucleotides and methods thereof as described herein may preferentially or specifically target the associated allele relative to the one or more less-associated/unassociated allele(s).

[0232] In some embodiments, a target sequence is a sequence to which a PNPLA3 oligonucleotide as described herein binds. In many embodiments, a target sequence is identical to, or is an exact complement of, a sequence of a provided oligonucleotide, or of consecutive residues therein (e a provided oligonucleotide includes a target-binding sequence that is identical to, or an exact complement of, a target sequence). In some embodiments, a small number of differences/mismatches is tolerated between (a relevant portion of) a PNPLA3 oligonucleotide and its target sequence. In many embodiments, a target sequence is present within a target gene. In many embodiments, a target sequence is present within a transcript (e.g., an mRNA and/or a pre-mRNA) produced from a target gene.

[0233] In some embodiments, a target sequence includes one or more allelic sites (i.e., positions within a target gene at which allelic variation occurs). In some such embodiments, a provided oligonucleotide binds to one allele preferentially or specifically relative to one or more other alleles. In some embodiments, a target-binding sequence is identical to, or is an exact complement of, a target sequence of one allele. In some embodiments, a target-binding sequence is identical to a target sequence of one allele. In some embodiments, a target-binding sequence is an exact complement of a target sequence of one allele. In some embodiments, a provided oligonucleotide binds preferentially to a disease-associated allele. In some embodiments, a provided oligonucleotide binds preferentially to a disease-associated allele, and comprises a target-binding sequence which is identical to, or is an exact complement of, a target sequence of a disease-associated allele but not other allele(s). For example, in some embodiments, a PNPLA3 oligonucleotide (or a target-binding sequence portion thereof) provided herein has a sequence that is identical to, or an exact complement of a particular allelic version of a target sequence. In some embodiments, a target sequence is a sequence of a particular allele. In some embodiments, a PNPLA3 oligonucleotide (or a target-binding sequence portion thereof) provided herein has a sequence that is identical to, or an exact complement of an allelic site of a disease-associated allele.

[0234] As appreciated by those skilled in the art, various allelic sites can be included in a target sequence in accordance with the present disclosure. In some embodiments, a target sequence comprises a SNP. In some embodiments, a target sequence comprises a mutation. In some embodiments, a SNP is a. SNP in PNPLA3.

[0235] Various linker, lipid moieties, carbohydrate moieties and targeting moieties, including many known in the art, can be utilized in accordance with the present disclosure. In some embodiments, a lipid moiety is a targeting moiety. In some embodiments, a carbohydrate moiety is a targeting moiety. In some embodiments, a targeting moiety is a lipid moiety. In some embodiments, a targeting moiety is a carbohydrate moiety. As readily appreciated by those skilled in the art, various link ers, including those described in the present disclosure, can be utilized in accordance with the present disclosure to link two moieties, for example, a lipid/carbohydrate/targeting component with an PNPLA3 oligonucleotide moiety. As readily appreciated by those skilled in the art, linkers described for linking two moieties can also be used to link other moieties, for example, linkers for linking a lipid and a PNPLA3 oligonucleotide moiety can also be used to link a carbohydrate or target moiety with a PNPLA3 oligonucleotide moiety and vice versa.

[0236] In some embodiments, the present disclosure provides oligonucleotides and oligonucleotide compositions that are chirally controlled. For instance, in some embodiments, a provided composition contains predetermined levels of one or more individual oligonucleotide types, wherein a PNPLA3 oligonucleotide type is defined by: 1) base sequence; 2) pattern of backbone linkages; 3) pattern of backbone chiral centers; and 4) pattern of backbone P-modifications. In some embodiments, a particular oligonucleotide type may be defined by 1A) base identity; 1B) pattern of base modification; 1C) pattern of sugar modification; 2) pattern of backbone linkages; 3) pattern of backbone chiral centers; and 4) pattern of backbone P-modifications. In some embodiments, oligonucleotides of the same oligonucleotide type are identical. In some embodiments, the present disclosure provides chirally controlled oligonucleotide compositions of oligonucleotides, wherein the composition comprises a predetermined level of a plurality of oligonucleotides, wherein oligonucleotides of the plurality share a common base sequence, and comprise the same configuration of linkage phosphorus at at least 1.2, 3, 4, 5, 6, 7, 8, 9, 10, 11, 12, 13, 14, 15, 16, 17, 18, 19, 20, 21, 22, 23, 24, or 25 chiral internucleotidic linkages (chirally controlled internucleotidic linkages).

[0237] In some embodiments, provided oligonucleotides comprise 2-30 chirally controlled internucleotidic linkages. In some embodiments, provided oligonucleotides comprise 5-30 chirally controlled internucleotidic linkages. In some embodiments, provided oligonucleotides comprise 10-30 chirally controlled internucleotidic linkages. In some embodiments, provided oligonucleotides comprise 1 chirally controlled internucleotidic linkage. In some embodiments, provided oligonucleotides comprise 2 chirally controlled internucleotidic linkages. In some embodiments, provided oligonucleotides comprise 3 chirally controlled internucleotidic linkages. In some embodiments, provided oligonucleotides comprise 4 chirally controlled internucleotidic linkages. In some embodiments, provided oligonucleotides comprise 5 chirally controlled internucleotidic linkages. In some embodiments, provided oligonucleotides comprise 6 chirally controlled internucleotidic linkages. In some embodiments, provided oligonucleotides comprise 7 chirally controlled internucleotidic linkages. In some embodiments, provided oligonucleotides comprise 8 chirally controlled internucleotidic linkages. In some embodiments, provided oligonucleotides comprise 9 chirally controlled internucleotidic linkages. In some embodiments, provided oligonucleotides comprise 10 chirally controlled internucleotidic linkages. In some embodiments, provided oligonucleotides comprise 11 chirally controlled internucleotidic linkages. In some embodiments, provided oligonucleotides comprise 12 chirally controlled internucleotidic linkages. In some embodiments, provided oligonucleotides comprise 13 chirally controlled internucleotidic linkages. In some embodiments, provided oligonucleotides comprise 14 chirally controlled internucleotidic linkages. In some embodiments, provided oligonucleotides have 15 chirally controlled internucleotidic linkages. In some embodiments, provided oligonucleotides have 16 chirally controlled internucleotidic linkages. In some embodiments, provided oligonucleotides have 17 chirally controlled internucleotidic linkages. In some embodiments, provided oligonucleotides have 18 chirally controlled internucleotidic linkages. In some embodiments, provided oligonucleotides have 19 chirally controlled internucleotidic linkages. In some embodiments, provided oligonucleotides have 20 chirally controlled internucleotidic linkages.

[0238] In some embodiments, a provided oligonucleotide is a unimer. In some embodiments, a provided oligonucleotide is a P-modification unimer. In some embodiments, a provided oligonucleotide is a stereounimer. In some embodiments, a provided oligonucleotide is a stereounimer of configuration 4. In some embodiments, a provided oligonucleotide is a stereounimer of configuration Sp.

[0239] In some embodiments, a provided oligonucleotide is an altmer. In some embodiments, a provided oligonucleotide is a P-modification altmer. In some embodiments, a provided oligonucleotide is a stereoaltmer.

[0240] In some embodiments, a provided oligonucleotide is a blockmer. In some embodiments, a provided oligonucleotide is a P-modification blockmer. In some embodiments, a provided oligonucleotide is a stereoblockmer.

[0241] In some embodiments, a provided oligonucleotide is a gapmer.

[0242] In some embodiments, a provided oligonucleotide is a skipmer.

[0243] In some embodiments, a provided oligonucleotide is a hemimer. In some embodiments, a hemimer is an PNPLA3 oligonucleotide wherein the 5′-end or the 3′-end region has a sequence that possesses a structure feature that the rest of the oligonucleotide does not have. In some embodiments, the 5′-end or the 3′-end region has or comprises 2 to 20 nucleotides. In some embodiments, a structural feature is a base modification. In some embodiments, a structural feature is a sugar modification. In some embodiments, a structural feature is a P-modification. In some embodiments, a structural feature is stereochemistry of the chiral internucleotidic linkage. In some embodiments, a structural feature is or comprises a base modification, a sugar modification, a P-modification, or stereochemistry of the chiral internucleotidic linkage, or combinations thereof. In some embodiments, a hemimer is an PNPLA3 oligonucleotide in which each sugar moiety of the 5′-end region shares a common modification. In some embodiments, a hemimer is an PNPLA3 oligonucleotide in which each sugar moiety of the 3′-end region shares a common modification. In some embodiments, a common sugar modification of the 5′ or 3′-end region is not shared by any other sugar moieties in the oligonucleotide. In some embodiments, an example hemimer is a PNPLA3 oligonucleotide comprising a sequence of substituted or unsubstituted 2′ sugar modified nucleosides, bicyclic sugar modified nucleosides, β-D-ribonucleosides deoxyribonucleosides (for example 2′-MOE modified nucleosides, and LNA™ or ENA™ bicyclic sugar modified nucleosides) at one terminus region and a sequence of nucleosides with a different sugar moiety (such as a substituted or unsubstituted 2′-O-alkyl sugar modified nucleosides, bicyclic sugar modified nucleosides or natural ones) at the other terminus region. In some embodiments, a provided oligonucleotide is a combination of one or more of unimer, altmer, blockmer, gapmer, hemimer and skipmer. In some embodiments, a provided oligonucleotide is a combination of one or more of unimer, altmer, blockmer, gapmer, and skipmer. For instance, in some embodiments, a provided oligo nucleotide is both an altmer and a gapmer. In some embodiments, a provided nucleotide is both a gapmer and a skipmer. One of skill in the chemical and synthetic arts will recognize that numerous other combinations of patterns are available and are limited only by the commercial availability and/or synthetic accessibility of constituent parts required to synthesize a provided oligonucleotide in accordance with methods of the present disclosure. In some embodiments, a hemimer structure provides advantageous benefits. In some embodiments, provided oligonucleotides are 5′-hemimers that comprises modified sugar moieties in a 5″-end sequence. In some embodiments, provided oligonucleotides are 5′-hemimers that comprises modified 2′-sugar moieties in a 5′-end sequence.

[0244] In some embodiments, a provided oligonucleotide comprises one or more optionally substituted nucleotides, in some embodiments, a provided oligonucleotide comprises one or more modified nucleotides. In some embodiments, a provided oligonucleotide comprises one or more optionally substituted nucleosides. In some embodiments, a provided oligonucleotide comprises one or more modified nucleosides. In some embodiments, a provided oligonucleotide comprises one or more optionally substituted LNAs.

[0245] In some embodiments, a provided oligonucleotide comprises one or more optionally substituted nucleobases. In some embodiments, a provided oligonucleotide comprises one or more optionally substituted natural nucleobases. In some embodiments, a provided oligonucleotide comprises one or more optionally substituted modified nucleobases. In some embodiments, a provided oligonucleotide comprises one or more 5-methylcytidine; 5-hydroxymethylcytidine, 5-formylcytosine, or 5-carboxylcytosine. In some embodiments, a provided oligonucleotide comprises one or more 5-methylcytidine.

[0246] In some embodiments, each base (BA) is independently an optionally substituted or protected nucleobase of adenine, cytosine, guanosine, thymine, or uracil. As appreciated by those skilled in the art, various protected nucleobases, including those widely known in the art, for example, those used in oligonucleotide preparation (e.g., protected nucleobases of WO/20101064146, WO/2011/005761, WO/2013/012758, WO/2014/010250, US2013/0178612, WO/2014/012081, WO/2015/107425, WO2017/015555, and WO2017/062862, protected nucleobases of each of which are incorporated herein by reference), and can be utilized in accordance with the present disclosure.

[0247] In some embodiments, a provided oligonucleotide comprises one or more optionally substituted sugars. In some embodiments, a provided oligonucleotide comprises one or more optionally substituted sugars found in naturally occurring DNA and RNA. In some embodiments, a provided oligonucleotide comprises one or more optionally substituted ribose or deoxyribose. In some embodiments, a provided oligonucleotide comprises one or more optionally substituted ribose or deoxyribose, wherein one or more hydroxyl groups of the ribose or deoxyribose moiety is optionally and independently replaced by halogen, R′, —N(R)₂, —OR′, or —SR′, wherein each R′ is independently as defined above and described herein. In some embodiments, a provided oligonucleotide comprises one or more optionally substituted deoxyribose, wherein the 2′ position of the deoxyribose is optionally and independently substituted with halogen, R′, —N(R′)₂, —OR′, or —SR′, wherein each R′ is independently as defined above and described herein. In some embodiments, a provided oligonucleotide comprises one or more optionally substituted deoxyribose, wherein the 2′ position of the deoxyribose is optionally and independently substituted with halogen. In some embodiments, a provided oligonucleotide comprises one or more optionally substituted deoxyribose, wherein the 2′ position of the deoxyribose is optionally and independently substituted with one or more —F. halogen. In some embodiments, a provided oligonucleotide comprises one or more optionally substituted deoxyribose, wherein the 2′ position of the deoxyribose is optionally and independently substituted with —OR′, wherein each R′ is independently as defined above and described herein. In some embodiments, a provided oligonucleotide comprises one or more optionally substituted deoxyribose, wherein the 2′ position of the deoxyribose is optionally and independently substituted with —OR′, wherein each R′ is independently an optionally substituted C₁-C₆ aliphatic. In some embodiments, a provided oligonucleotide comprises one or more optionally substituted deoxyribose, wherein the 2′ position of the deoxyribose is optionally and independently substituted with —OR′, wherein each R′ is independently an optionally substituted C₁-C₆ alkyl. In some embodiments, a provided oligonucleotide comprises one or more optionally substituted deoxyribose, wherein the 2′ position of the deoxyribose is optionally and independently substituted with —OMe. In some embodiments, a provided oligonucleotide comprises one or more optionally substituted deoxyribose, wherein the 2′ position of the deoxyribose is optionally and independently substituted with —O-methoxyethyl.

[0248] In some embodiments, a provided oligonucleotide is a hybridized oligonucleotide strand. In certain embodiments, a provided oligonucleotide is a partially hybridized oligonucleotide strand. In certain embodiments, a provided oligonucleotide is a completely hybridized oligonucleotide strand. In certain embodiments, a provided oligonucleotide is a double-stranded oligonucleotide. In certain embodiments, a provided oligonucleotide is a triple-stranded oligonucleotide (e.g., a triplex).

[0249] In some embodiments, any one of the structures comprising a PNPLA3 oligonucleotide depicted in WO2012/030683 can be modified in accordance with methods of the present disclosure to provide chirally controlled compositions thereof. For example, in some embodiments, chirally controlled composition comprises a stereochemical control at any one or more of chiral linkage phosphorus atoms, optionally through incorporation of one or more P-modifications described in WO2012/030683 or the present disclosure. For example, in some embodiments, a particular nucleotide unit of a PNPLA3 oligonucleotide of WO2012/030683 is preselected to be provided with chiral control at the linkage phosphorus of that nucleotide unit and/or to be P-modified with chiral control at the linkage phosphorus of that nucleotide unit.

[0250] In some embodiments, a provided oligonucleotide comprises a nucleic acid analog, ex, GNA, LNA, PNA, TNA, F-HNA (F-THP or 3′ fluoro tetrahydropyran), MNA (mannitol nucleic acid, e.g., Leumann 2002 Bioorg. Med. Chem. 10: 841-854), ANA (anitol nucleic acid), and Morpholino.

[0251] In some embodiments, a provided oligonucleotide is characterized as having the ability to indirectly or directly increase or decrease activity of a protein or inhibition or promotion of the expression of a protein. In some embodiments, a provided oligonucleotide is characterized in that it is useful in the control of cell proliferation, viral replication, and/or any other cell signaling process.

[0252] In some embodiments, the 5′-end and/or the 3′-end of a provided oligonucleotide is modified. In some embodiments, the 5′-end and/or the 3′-end of a provided oligonucleotide is modified with a terminal cap moiety. Examples of such modifications, including terminal cap moieties are extensively described herein and in the art, for example but not limited to those described in US Patent Application Publication US 2009/0023675 A1.

[0253] In some embodiments, oligonucleotides of a PNPLA3 oligonucleotide type characterized by 1) a common base sequence and length, 2) a common pattern of backbone linkages, and 3) a common pattern of backbone chiral centers, have the same chemical structure. For example, they have the same base sequence, the same pattern of nucleoside modifications, the same pattern of backbone linkages (i.e., pattern of internucleotidic linkage types, for example, phosphate, phosphorothioate, etc), the same pattern of backbone chiral centers (i.e. pattern of linkage phosphorus stereochemistry (Rp/Sp)), and the same pattern of backbone phosphorus modifications (e.g. pattern of “-XLR¹” groups in Formula I).

[0254] Single-Stranded RNAi Agents and Antisense Oligonucleotides

[0255] In some embodiments, the present disclosure provides oligonucleotides. In some embodiments, the present disclosure provides oligonucleotides which decrease the expression and/or level of a target gene or its gene product. Those of ordinary skill in the art, reading the present disclosure, will appreciate that, in some embodiments, provided oligonucleotides may act as RNAi agents. Alternatively or additionally, in some embodiments, provided oligonucleotides may act via an RNase H-dependent mechanism and/or another biochemical mechanism that does not involve RNA interference.

[0256] Among other things, the present disclosure defines certain structural attributes that may be particularly desirable and/or effective in an PNPLA3 oligonucleotide. Among other things, the present disclosure defines certain structural attributes that may be particularly desirable and/or effective in a PNPLA3 oligonucleotide that acts as an RNAi agent. In some embodiments, the present disclosure defines certain structural attributes that may be particularly desirable and/or effective in a PNPLA3 oligonucleotide that acts via an RNase H-dependent mechanism and/or other biochemical mechanism. In some embodiments, the present disclosure defines certain structural attributes that may be particularly desirable and/or effective in a single-stranded ssRNAi agent (ssRNAi or ssRNAi agent); in some such embodiments, as described further herein below, such structural attributes may be distinct from those that are particularly desirable and/or effective in a corresponding strand of a double-stranded RNAi agent (dsRNAi or dsRNAi agent). In some embodiments, provided oligonucleotides are single-stranded RNAi agents (e.g., which can be loaded into RISC and/or can direct or enhance RISC-mediated target). In some embodiments, provided oligonucleotides are anti sense oligonucleotides (e.g., which can be loaded into RNase H and/or direct or enhance RNase-H-mediated cleavage of a target and/or operate via a different biochemical mechanism).

[0257] In some embodiments (including in some single-stranded oligonucleotide embodiments), oligonucleotides that act as RNAi, agents may have one or more different structural attributes and/or functional properties from those oligonucleotides that act via an RNase H-dependent mechanism. In some embodiments, a PNPLA3 oligonucleotide can direct a decrease in the expression and/or level of a target gene or its gene product by sterically blocking translation after binding to a target gene mRNA, and/or by altering or interfering with mRNA splicing and/or exon inclusion or exclusion (e.g., skipping). In some embodiments, a PNPLA3 oligonucleotide can perform a function, or a significant percentage of a function (for example, 10-100%, no less than 10%, 20%, 30%, 40%, 50%, 60%, 70%, 80%. 90% percent or more) independent of RNA interference or RISC.

[0258] In some embodiments, a provided oligonucleotide is an antisense oligonucleotide (ASO) which directs cleavage of a target RNA mediated by RNase H and not RISC (IRNA interference silencing complex).

[0259] In some embodiments, a provided oligonucleotide is a single-stranded RNAi (ssRNAi) agent which directs cleavage of a target mRNA mediated by the RISC (RNA interference silencing complex) and not the enzyme RNaseH. In some embodiments, a PNPLA3 oligonucleotide can perform a function, or a significant percentage of a function (for example, 10-100%, no less than 10%, 20%, 30%, 40%, 50%, 60%, 70%, 80%, 90% percent or more) independent of RNase H.

[0260] A double-stranded RNAi agent can also direct cleavage of a target mRNA using RISC and not the enzyme RNase H. In some embodiments, a single-stranded RNAi agent differs from a double-stranded RNAi agent in that a ssRNAi agent includes only a single oligonucleotide strand and generally does not comprise a double-stranded region of significant length, and a dsRNAi agent comprises a double stranded region of significant length (e.g., at least about 15 bp, or about 19 bp in a “canonical” siRNA), in some embodiments, a dsRNAi comprises two separate, complementary strands (which are not covalently linked) which form a double-stranded region (e.g., in a “canonical” siRNA), or a long single strand which comprises two complementary sequences which together form a double-stranded region (e.g., in a shRNA or short hairpin RNA). In some embodiments of a dsRNAi, the passenger strand has a single-stranded nick, forming two strands. In some embodiments, the present disclosure demonstrates that sequences and/or structural elements (chemical modifications, stereochemistry, etc.) required for efficacious single-stranded RNAi agents may differ from those required for efficacious double-stranded RNAi agents.

[0261] Among other things, the present disclosure encompasses the recognition that certain designs (e.g., sequences and/or structural elements) which may be suitable for double-stranded RNAi agents may not be suitable for single-stranded RNAi agents (including single-stranded RNAi agents of provided formats described herein), and vice versa. In some embodiments, the present disclosure provides designs for effective ssRNAi. In some embodiments, the present disclosure demonstrates that certain base sequences, when combined with structural elements (modifications, stereochemistry, additional chemical moiety or moieties, etc.) in accordance with the present disclosure, can provided oligonucleotides having unexpectedly high activities, for example, when administered as ssRNAi agents, particularly m comparison with oligonucleotides comprising the same sequences but double-stranded and administered as dsRNAi agents. In some embodiments, the present disclosure demonstrates that certain base sequences, when combined with structural elements (modifications, stereochemistry, additional chemical moiety or moieties, etc.) in accordance with the present disclosure, can provided oligonucleotides having unexpectedly high activities, for example, the ability to decrease the expression and/or level of a target gene oats gene product.

[0262] Structural and functional differences between single-stranded RNAi (ssRNAi) agents, double-stranded RNAi (dsRNAi) agents, and RNaseH-dependent antisense oligonucleotides (ASOs)

[0263] In some embodiments, single-stranded RNAi (ssRNAi) agents, double-stranded RNAi (dsRNAi) agents and RNase H-dependent antisense oligonucleotides (ASOs) all involve binding of an agent or oligonucleotide (or portion thereof) to a complementary (or substantially complementary) target RNA (e.g., a mRNA or pre-mRNA), followed by cleavage of the target RNA and/or a decrease the expression and/or level of a target gene or its gene product. In some embodiments, RNAi agents, whether double- or single-stranded, employ the RISC, or RNA interference silencing complex, which includes the enzyme Ago-2 (Argonaute-2). In some embodiments, RNase H-dependent antisense oligonucleotides are single-stranded and employ a different enzyme, RNase H. RNAse H is reportedly a cellular endonuclease which cleaves the RNA strand of an RNA:DNA duplex; see U.S. Pat. No. 7,919,472. See also, Saetrom (2004 Bioinformatics 20: 3055-3063); Kretschmer-Kazemi Far et al. (2003 Nucleic Acids 31: 4417-4424) Bertrand et al. (2002) Biochem. Biophys. Res. Comm. 296: 1000-1004); Vickers et al. (2003 J. Biol. Chem. 278: 7108). In some embodiments, oligonucleotides that can direct RNase H-mediated knockdown include, but are not limited to, those consisting of or comprising a region of consecutive 2′-deoxy nucleotide units which contain no 2′-modifications. In some embodiments, oligonucleotides that can direct RNase H-mediated knockdown are gap-widened oligonucleotides or gapmers. In some embodiments, a gapmer comprises an internal region comprises a plurality of nucleotides that supports RNase H cleavage and is positioned between external regions having a plurality of nucleotides that are chemically distinct from the nucleosides of the internal region. In some, embodiments, a gapmer comprise a span of 2′-deoxy nucleotides containing no 2′-modifications, flanked or adjacent to one or two wings. In some embodiments, a gap directs RNase H cleavage of the corresponding RNA target. In some embodiments, the wings do not direct or act as substrates for RNase H cleavage. The wings can be of varying lengths (including, but not limited to, 1 to 8 nt) and can comprise various modifications or analogs (including, but not limited to, 2′-modifications, including, but not limited to, 2′-OMe and 2′-MOE). See, as non-limiting examples, U.S. Pat. Nos. 9,550,988; 7,919,472; 5,013,830; 5,149,797; 5,220,007; 5,256,775; 5,366,878; 5,403,711; 5,491,133; 5,565,350; 5,623,065; 5,652,355; 5,652,356; and 5,700,922. In some embodiments, presence of one or more such modifications or analogs may correlate with modified (e.g., increased, reduced, or altered) RNase H cleavage of a target.

[0264] In some embodiments, double-stranded RNAi agents, even the antisense strand thereof, differ structurally from a RNase H-dependent antisense oligonucleotide. In some embodiments, RNase H-dependent antisense oligonucleotides and siRNA oligonucleotides seem to have completely opposite characteristics, both regarding 5′-end structures and overall duplex stability.

[0265] Double-stranded RNAi agents can reportedly be naturally-produced in a cell by the Dicer enzyme, which cleaves larger RNA molecules, such as double-stranded RNA from invading viruses, into a dsRNA. The canonical structure of a dsRNA agent comprises two strands of RNA, each about 19 to 23 nt long, which are annealed to form an about 19-21 by double-stranded region and two 3′ dinucleotide overhangs. For a double-stranded RNAi agent, the sense strand is reportedly unwound from the duplex before the antisense strand is incorporated into RISC. Aside from the natural separation of a double-stranded RNAi agent into antisense and sense strands, single-stranded RNAi agents have not been reported to be naturally produced in a human cell.

[0266] Among other things, the present disclosure provides the teaching that, in many cases, a single-stranded RNAi agent is not simply an isolated antisense strand of a double-stranded RNAi agent in that, for example, an antisense strand of an effective dsRNAi agent may be much less effective than the dsRNAi agent, and a ssRNAi agent, when formulated as a dsRNAi agent (for example, by annealing with a sense strand), may be much less effective than the ssRNAi agent. In some embodiments, double-stranded and single-stranded RNAi agents differ in many significant ways. Structural parameters of double-stranded RNAi agents are not necessarily reflected in single-stranded RNAi agents.

[0267] In some embodiments, the present disclosure teaches that target sequences which are suitable for double-stranded RNAi agents may not be suitable for single-stranded RNAi agents, and vice versa. For example, in at least some cases, single-stranded versions of double-stranded RNAi agent may not be efficacious. As a non-limiting example, Table 46A shows that several ssRNAi agents were constructed with sequences derived from dsRNAi. These ssRNAi based on dsRNAi were generally less efficacious than the corresponding dsRNAi.

[0268] In some embodiments, double-stranded and single-stranded RNAi agents also differ in their sensitivity to incorporation of chirally controlled internucleotidic linkages. For example, Matranga et al. (2005 Cell 123: 607-620) reported that introduction of a single Sp internucleotidic linkage (e.g., a single Sp PS) into the sense strand of a double-stranded RNAi agent greatly decreased RISC assembly and RNA interference activity. In contrast, in some embodiments, data shown herein demonstrate that, surprisingly, incorporation of a Sp internucleotidic linkage)(e.g., Sp PS) can perform two functions for a single-stranded RNAi agent: (a) it increases stability against nucleases; and (b) does not interfere with RNA interference activity. Many example oligonucleotides can perform as efficacious single-stranded RNAi agents comprising one or more chi rally controlled internucleotidic linkages (e.g., Sp internucleotidic linkages, or Sp PS (phosphorothioate) are shown herein).

[0269] Alternatively or additionally, double-stranded and single-stranded RNAi agents can differ in immunogenicity. In some embodiments, some single-stranded RNAi agents are reportedly more immunogenic than double-stranded RNAi agents. Sioud J. Mol. Biol. (2005) 348, 1079-1090. In some embodiments, several double-stranded RNAi agents reportedly did not induce an immune response, whereas corresponding single-stranded RNAi agents did. In some embodiments, the present disclosure provides oligonucleotides with low immunogenicity. In some embodiments, such oligonucleotides can be utilized as ssRNAi reagent.

[0270] Among other things, the present disclosure encompasses the recognition that certain conventional designs of single-stranded RNAi agents, which derive single-stranded RNAi agents, including base sequences, from double-stranded RNAi agents, often fail to provide effective single-stranded RNAi agents. In some embodiments, the present disclosure demonstrates that, surprisingly, ssRNAi agents derived from base sequences of effective RNase H-dependent ASOs can produce efficacious ssRNAi agents (see Table 46A).

[0271] In some embodiments, the present disclosure provides oligonucleotides which can be utilized as efficacious RNase-H dependent ASOs, which comprise regions of 2′-deoxy nucleotides without 2′-modifications, and which are complementary or substantially complementary to RNA sequences; or portions thereof. In some embodiments, a region can be, for example, a core sequence of about 10 nt flanked on one or both sides by wings, wherein the wings differ from the core in chemistry and can comprise, as non-limiting examples, 2′-modifications or internucleotidic linkage modifications.

[0272] Oligonucleotides

[0273] In some embodiments, provided oligonucleotides can direct a decrease in the expression and/or level of a target gene or its gene product. In some embodiments, provided oligonucleotides can direct a decrease in the expression and/or level of a target gene or its gene product via RNA interference. In some embodiments, provided oligonucleotides can direct a decrease in the expression and/or level of a target gene or its gene product via, a biochemical mechanism which does not involve RNA interference or RISC (including, but not limited to, RNaseH-mediated knockdown or steric hindrance of gene expression). In some embodiments, provided oligonucleotides can direct a decrease in the expression and/or level of a, target gene or its gene product via RNA interference and/or RNase H-mediated knockdown. In some embodiments, provided oligonucleotides can direct a decrease in the expression and/or level of a target gene or its gene product by sterically blocking translation after binding to a target gene mRNA, and/or by altering or interfering with mRNA splicing and/or ex on inclusion or exclusion.

[0274] In some embodiments, a provided oligonucleotide has a structural element or format or portion thereof described herein.

[0275] In some embodiments, a provided oligonucleotide capable of directing a decrease in the expression and/or level of a target gene or its gene product has a structural element or format or portion thereof described herein.

[0276] In some embodiments, a provided oligonucleotide capable of directing a decrease in the expression and/or level of a target gene or its gene product has the format of any oligonucleotide disclosed herein, e.g., in Table 1A, or in the Figures or Tables, or otherwise disclosed herein.

[0277] In some embodiments, a provided oligonucleotide has any of Formats illustrated in FIG. 1.

[0278] The present disclosure presents data showing drat various oligonucleotides of various formats are capable of directing a decrease in the expression and/or level of a target gene or its gene product targeted against any of multiple different sequences, in multiple different genes, in multiple different species; additional data was generated supporting the efficacy of ssRNAi agents of the disclosed Formats and not shown.

[0279] In some embodiments, a provided oligonucleotide capable of directing RNase H-mediated knockdown has a structural element or format or portion thereof described herein.

[0280] In some embodiments, a provided oligonucleotide capable of directing RNase H-mediated knockdown has the format of any oligonucleotide disclosed herein, e.g., in Table 1A or in the Figures or Tables, or otherwise disclosed herein.

[0281] In some embodiments, a provided oligonucleotide has any of Formats illustrated in FIG. 1.

[0282] The present disclosure presents data showing that various oligonucleotides of various formats are capable of directing RNase H-mediated knockdown against any of multiple different sequences, in multiple different genes, in multiple different species; additional data was generated supporting the efficacy of ssRNAi agents of the disclosed Formats and not shown.

[0283] In some embodiments, a provided oligonucleotide capable of directing single-stranded RNA interference has a structural element or format or portion thereof described herein.

[0284] In some embodiments, a provided oligonucleotide capable of directing single-stranded RNA interference h as the format of any oligonucleotide disclosed herein, e.g., in Table 1 A or in the Figures or Tables, or otherwise disclosed herein.

[0285] In some embodiments, a provided single-stranded RNAi agent has any of the Formats illustrated in FIG. 1.

[0286] The present disclosure presents data showing that various RNAi agents of various formats are capable of directing RNA interference against any of multiple different sequences, in any of multiple different genes: additional data was generated supporting, the efficacy of ssRNAi agents of the disclosed Formats and not shown.

[0287] In some embodiments, a target of RNAi is a transcript. In some embodiments, a transcript is pre-mRNA. In some embodiments, a transcript is mature RNA. In some embodiments, a transcript is mRNA. In some embodiments, a transcript comprises a mutation. In some embodiments, a mutation is a frameshift. In some embodiments, a transcript comprises a premature termination codon. In some embodiments, a target of RNAi is a RNA which is not a mRNA. In some embodiments, a target of RNAi is a non-coding RNA. In some embodiments, a target of RNAi is a long non-coding RNA. In some embodiments, provided oligonucleotides in provided compositions, e.g., oligonucleotides of a first plurality, comprise base modifications, sugar modifications, and/or internucleotidic linkage modifications. In some embodiments, provided oligonucleotides comprise base modifications and sugar modifications. In some embodiments, provided oligonucleotides comprise base modifications and internucleotidic linkage modifications. In some embodiments, provided oligonucleotides comprise sugar modifications and internucleotidic modifications. In some embodiments, provided compositions comprise base modifications, sugar modifications, and internucleotidic linkage modifications. Example chemical modifications, such as base modifications, sugar modifications, internucleotidic linkage modifications, etc are widely known in the art including but not limited to those described in this disclosure. In some embodiments, a modified base is substituted A, T, C, (1 or U. In some embodiments, a sugar modification is 2′-modification. In some embodiments, a 2′-modification is 2-F modification. In some embodiments, a 2′-modification is 2′-OR¹. In some embodiments, a 2′-modification is 2′-OR¹ wherein R¹ is optionally substituted alkyl. In some embodiments, a 2′-modification is 2′-OMe. In some embodiments, a 2′-modification is 2′-MOE. In some embodiments, a modified sugar moiety is a bridged bicyclic or polycyclic ring. In some embodiments, a modified sugar moiety is a bridged bicyclic or polycyclic ring having 5-20 ring atoms wherein one or more ring atoms are optionally and independently heteroatoms. Example ring structures are widely known in the art, such as those found in BNA, LNA, etc. In some embodiments, provided oligonucleotides comprise both one or more modified internucleotidic linkages and one or more natural phosphate linkages. In some embodiments, oligonucleotides comprising both modified internucleotidic linkage and natural phosphate linkage and compositions thereof provide improved properties, e.g., activities, etc. In some embodiments, a modified internucleotidic linkage is a chiral internucleotidic linkage. In some embodiments, a modified internucleotidic linkage is a phosphorothioate linkage. In some embodiments, a modified internucleotidic linkage is a substituted phosphorothioate linkage.

[0288] Among other things, the present disclosure encompasses the recognition that stereorandom oligonucleotide preparations contain a plurality of distinct chemical entities that differ from one another, e.g., in the stereochemical structure of individual backbone chiral centers within the oligonucleotide chain. Without control of stereochemistry of backbone chiral centers, stereorandom oligonucleotide preparations provide uncontrolled compositions comprising undetermined levels of oligonucleotide stereoisomers. Even though these stereoisomers may have the same base sequence, they are different chemical entities at least due to their different backbone stereochemistry, and they can have, as demonstrated herein, different properties, e.g., activities, etc. Among other things, the present disclosure provides new compositions that are or contain particular stereoisomers of oligonucleotides of interest. In some embodiments, a particular stereoisomer may be defined, for example, by its base sequence, its length, its pattern of backbone linkages, and its pattern of backbone chiral centers. As is understood in the art, in some embodiments, base sequence may refer to the identity and/or modification status of nucleoside residues (e.g., of sugar and/or base components, relative to standard naturally occurring nucleotides such as adenine, cytosine, guanosine, thymine, and uracil) in a PNPLA3 oligonucleotide and/or to the hybridization character (i.e., the ability to hybridize with particular complementary residues) of such residues. In some embodiments, the present disclosure provide an PNPLA3 oligonucleotide composition comprising a predetermined level of oligonucleotides of an individual oligonucleotide type which are chemically identical, e.g., they have the same base sequence, the same pattern of nucleoside modifications (modifications to sugar and base moieties, if any), the same pattern of backbone chiral centers, and the same pattern of backbone phosphorus modifications. The present disclosure demonstrates, among other things, that individual stereoisomers of a particular oligonucleotide can show different stability and/or activity from each other. In some embodiments, property improvements achieved through inclusion and/or location of particular chiral structures within a PNPLA3 oligonucleotide can be comparable to, or even better than those achieved through use of particular backbone linkages, residue modifications, etc. (e.g., through use of certain types of modified phosphates [e.g., phosphorothioate, substituted phosphorothioate, etc.], sugar modifications [e.g., 2′-modifications, etc.], and/or base modifications [e.g., methylation, etc.]). Among other things, the present disclosure recognizes that, in some embodiments, properties (e.g., activities, etc.) of an PNPLA3 oligonucleotide can be adjusted by optimizing its pattern of backbone chiral centers, optionally in combination with adjustment/optimization of one or more other features (e.g., linkage pattern, nucleoside modification pattern, etc.) of the oligonucleotide. As exemplified by various examples in the present disclosure, provided chirally controlled oligonucleotide compositions can demonstrate improved properties, e.g., improved single-stranded RNA interference activity, RNase H-mediated knockdown, improved delivery, etc.

[0289] In some embodiments, oligonucleotide properties can be adjusted by optimizing stereochemistry (pattern of backbone chiral centers) and chemical modifications (modifications of base, sugar, and/or internucleotidic linkage) or patterns thereof.

[0290] In some embodiments, a common pattern of backbone chiral centers (e.g., a pattern of backbone chiral centers in a single-stranded RNAi agent) comprises a pattern of OSOSO, OSSSO, OSSSOS, SOSO, SOSO, SOSOS, SOSOSO, SOSOSOSO, SOSSSO, SSOSSSOSS, SSSOSOSSS, SSSSOSOSSSS, SSSSS, SSSSSS, SSSSSSS, SSSSSSSS, SSSSSSSSS, or RRR, wherein S represents a phosphorothioate in the Sp configuration, and O represents a phosphodiester: wherein R represents a phosphorothioate in the Rp configuration.

[0291] In some embodiments, the non-chiral center is a phosphodiester linkage. In some embodiments, the chiral center in a Sp configuration is a phosphorothioate linkage. In some embodiments, the non-chiral center is a phosphodiester linkage. In some embodiments, the chiral center in a Sp configuration is a phosphorothioate linkage.

[0292] In some embodiments, a provided oligonucleotide comprises any pattern of stereochemistry described herein. In some embodiments, a provided oligonucleotide comprises any pattern of stereochemistry described herein and is capable of directing RNA interference. In some embodiments, a provided oligonucleotide comprises any pattern of stereochemistry described herein and is capable of directing RNase H-mediated knockdown. In some embodiments, a provided oligonucleotide comprises any pattern of stereochemistry described herein and is capable of directing RNA interference and RNase H-mediated knockdown. In some embodiments, a provided oligonucleotide comprises any pattern of stereochemistry described herein and is capable of directing RNA interference, wherein the pattern of stereochemistry is in the seed and/or post-seed region. In some embodiments, a provided oligonucleotide comprises any pattern of stereochemistry described herein and is capable of directing RNA interference and RNase H-mediated knockdown, wherein the pattern of stereochemistry is in the seed and/or post-seed region.

[0293] In some embodiments, a provided oligonucleotide comprises any modification or pattern of modification described herein. In some embodiments, a provided oligonucleotide comprises any modification or pattern of modification described herein and is capable of directing RNA interference. In some embodiments, a provided oligonucleotide comprises any pattern of modification described herein and is capable of directing RNase H-mediated knockdown. In some embodiments, a provided oligonucleotide comprises any pattern of modification described herein and is capable of directing RNA interference and RNase H-mediated knockdown. In some embodiments, a provided oligonucleotide comprises any pattern of modification described herein and is capable of directing RNA interference, wherein the pattern of modification is in the seed and/or post-seed region. In some embodiments, a provided oligonucleotide comprises any pattern of modification described herein and is capable of directing RNA interference and RNase H-mediated knockdown, wherein the pattern of modification is in the seed and/or post-seed region. In some, embodiments, a modification or pattern of modification is a modification or pattern of modifications at the 2′ position of a sugar. In some embodiments, a modification or pattern of modification is a modification or pattern of modifications of sugars, e.g., at the 2′ position of a sugar, including but not limited to, 2′-deoxy, 2′-F, 2′-OME, and 2′-ORI, wherein R1 is optionally substituted C₁-6 alkyl.

[0294] In some embodiments, the present disclosure demonstrates that 2′-F modifications, among other things, can improve single-stranded RNA interference. In some embodiments, the present disclosure demonstrates that Sp internucleotidic linkages, among other things, at the 5′- and 3′-ends can improve oligonucleotide stability. In some embodiments, the present disclosure demonstrates that, among other things, natural phosphate linkages and/or Rp internucleotidic linkages can improve removal of oligonucleotides from a system. As appreciated by a person having ordinary skill in the art, various assays known in the art can be utilized to assess such properties in accordance with the present disclosure.

[0295] In some embodiments, provided oligonucleotides capable of directing single-stranded RNA interference comprise one or more modified sugar moieties. In some embodiments, 5% or more of the sugar moieties of provided oligonucleotides are modified.

[0296] In some embodiments, the present disclosure provides an PNPLA3 oligonucleotide composition comprising a first plurality of oligonucleotides, wherein:
[0297] oligonucleotides of the first plurality have the same base sequence; and
[0298] oligonucleotides of the first plurality comprise one or more modified sugar moieties, or comprise one or more natural phosphate linkages and one or more modified internucleotidic linkages.

[0299] In some embodiments, oligonucleotides of the first plurality comprise one or more modified sugar moieties. In some embodiments, provided oligonucleotides comprise one or more modified sugar moieties.

[0300] In some embodiments, provided compositions alter transcript single-stranded RNA interference so that an undesired target and/or biological function are suppressed. In some embodiment, in such cases provided composition can also induce cleavage of the transcript after hybridization.

[0301] In some embodiments, each oligonucleotide of the first plurality comprises one or more modified sugar moieties and/or one or more modified internucleotidic linkages. In some embodiments, each oligonucleotide of the first plurality comprises no more than about 95% unmodified sugar moieties. In some embodiments, each oligonucleotide of the first plurality comprises no more than about 50% unmodified sugar moieties. In some embodiments, each oligonucleotide of the first plurality comprises no more than about 5% unmodified sugar moieties. In some embodiments, each sugar moiety of the oligonucleotides of the first plurality is independently modified.

[0302] In some embodiments, each oligonucleotide of the first plurality comprises two or more, modified internucleotidic linkages. In some embodiments, each oligonucleotide of the first plurality comprises three or more modified internucleotidic linkages. In some embodiments, each oligonucleotide of the first plurality comprises four or more modified internucleotidic linkages. In some embodiments, each oligonucleotide of the first plurality comprises five or more modified internucleotidic linkages. In some embodiments, each oligonucleotide of the first plurality comprises ten or more modified internucleotidic linkages.

[0303] In some embodiments, each oligonucleotide of the first plurality comprises no more than about 30% natural phosphate linkages. In some embodiments, each oligonucleotide of the first plurality comprises no more than about 20% natural phosphate linkages. In some embodiments, each oligonucleotide of the first plurality comprises no more than about 10% natural phosphate linkages. In some embodiments, each oligonucleotide of the first plurality comprises no more than about 5% natural phosphate linkages.

[0304] In some embodiments, provided oligonucleotides contain increased levels of one or more isotopes. In some embodiments, provided oligonucleotides are labeled, e.g., by one or more isotopes of one or more elements, e.g., hydrogen, carbon, nitrogen, etc. In some embodiments, provided oligonucleotides in provided compositions, e.g., oligonucleotides of a first plurality, comprise base modifications, sugar modifications, and/or internucleotidic linkage modifications, wherein the oligonucleotides contain an enriched level of deuterium. In some embodiments, provided oligonucleotides are labeled with deuterium (replacing —¹H with —²H) at one or more positions. In some embodiments, one or more ¹H of a PNPLA3 oligonucleotide or any moiety conjugated to the oligonucleotide (e.g., a targeting moiety, lipid moiety, etc.) is substituted with ²H. Such oligonucleotides can be used in any composition or method described herein.

[0305] The present invention includes all pharmaceutically acceptable isotopically-labelled compounds wherein one or more atoms are replaced by atoms having the same atomic number, but an atomic mass or mass number different from the atomic mass or mass number usually found in nature.

[0306] Examples of isotopes suitable for inclusion in the compounds of the invention include isotopes of hydrogen, such as ²H and ³H, carbon, such as ¹¹C, ¹³C and ¹⁴C, chlorine, such as ³⁶Cl, fluorine, such as ¹⁸F, iodine, such as ¹²³I, ¹²⁴I and ¹²⁵I, nitrogen, such as ¹³N and ¹⁵N, oxygen, such as ¹⁵O, ¹⁷O and ¹⁸O, phosphorus, such as ³²P, and sulphur, such as ³⁵S.

[0307] Certain isotopically-labelled compounds of Formula (I), for example, those incorporating a radioactive isotope, are useful in drug and/or substrate tissue distribution studies. The radioactive isotopes tritium, i.e. ³H, and carbon-14, i.e. ¹⁴C, are particularly useful for this purpose in view of their ease of incorporation and ready means of detection.

[0308] Substitution with heavier isotopes such as deuterium i.e. ²H, may afford certain therapeutic advantages resulting from greater metabolic stability, for example, increased in vivo half-life or reduced dosage requirements, and hence may be preferred in some circumstances.

[0309] Substitution with positron emitting isotopes, such as ¹¹C, ¹⁸F, ¹⁵O and ¹³N, can be useful in Positron Emission Tomography (PET) studies for examining substrate receptor occupancy.

[0310] Isotopically-labelled compounds can generally be prepared by conventional techniques known to those skilled in the art or by processes analogous to those described in the accompanying Examples and Preparations using an appropriate isotopically-labelled reagents in place of the non-labelled reagent previously employed.

[0311] The compounds of the present invention may contain asymmetric or chiral centers, and, therefore, exist in different stereoisomeric forms. Unless specified otherwise, it is intended that all stereoisomeric forms of the compounds of the present invention as well as mixtures thereof, including racemic mixtures, form part of the present invention. In addition, the present invention embraces all geometric and positional isomers. For example, if a compound of the present invention incorporates a double bond or a fused ring, both the cis- and trans-forms, as well as mixtures, are embraced within the scope of the invention.

[0312] Chiral compounds of the invention (and chiral precursors thereof) may be obtained in enantiomerically-enriched form using chromatography, typically high pressure liquid chromatography (HPLC) or supercritical fluid chromatography (SFC), on a resin with an asymmetric stationary phase and with a mobile phase consisting of a hydrocarbon, typically heptane or hexane, containing from 0 to 50% isopropanol, typically from 2 to 20%, and from 0 to 5% of an alkylamine, typically 0.1% diethylamine (DEA) or isopropylamine. Concentration of the eluent affords the enriched mixture.

[0313] Diastereomeric mixtures can be separated into their individual diastereoisomers on the basis of their physical chemical differences by methods well known to those skilled in the art, such as by chromatography and/or fractional crystallization. Enantiomers can be separated by converting the enantiomeric mixture into a diastereomeric mixture by reaction with an appropriate optically active compound (e.g. chiral auxiliary such as a chiral alcohol or Mother's acid chloride), separating the diastereoisomers and converting (e.g. hydrolyzing) the individual diastereoisomers to the corresponding pure enantiomers. Enantiomers can also be separated by use of a chiral HPLC column. Alternatively, the specific stereoisomers may be synthesized by using an optically active starting material, by asymmetric synthesis using optically active reagents, substrate, catalysts or solvents, or by converting one stereoisomer into the other by asymmetric transformation.

[0314] In some embodiments, controlling structural elements of oligonucleotides, such as chemical modifications (e.g., modifications of a sugar, base and/or internucleotidic linkage) or patterns thereof, alterations in stereochemistry (e.g., stereochemistry of a backbone chiral internucleotidic linkage) or patterns thereof, substitution of an atom with an isotope of the same element, and/or conjugation with an additional chemical moiety (e.g., a lipid moiety, targeting moiety, etc.) can have a significant impact on a desired biological effect. In some embodiments, a desired biological effect is enhanced by more than 2 fold.

[0315] In some embodiments, a desired biological effect is directing a decrease in the expression and/or level of a target gene or its gene product. In some embodiments, a desired biological effect is improved single-stranded RNA interference. In some embodiments, a desired biological effect is improved RNase H-mediated knockdown. In some embodiments, a desired biological effect is improved single-stranded RNA interference and/or RNase H-mediated knockdown.

[0316] In some embodiments, the present disclosure provides an PNPLA3 oligonucleotide composition comprising a first plurality of oligonucleotides which:
[0317] 1) have a common base sequence complementary to a target sequence in a transcript; and
[0318] 2) comprise one or more modified sugar moieties and modified internucleotidic linkages.

[0319] In some embodiments, a provided oligonucleotide composition is characterized in that, when it is contacted with the transcript in a single-stranded RNA interference system, RNAi-mediated knockdown of the transcript is improved relative to that observed under reference conditions selected from the group consisting of absence of the composition, presence of a reference composition, and combinations thereof.

[0320] In some embodiments, the present disclosure provides an PNPLA3 oligonucleotide composition comprising a first plurality of oligonucleotides capable of directing single-stranded RNA interference, wherein a PNPLA3 oligonucleotides type is defined by:
[0321] 1) base sequence;
[0322] 2) pattern of backbone linkages;
[0323] 3) pattern of backbone chiral centers; and
[0324] 4) pattern of backbone phosphorus modifications,
   which composition is chirally controlled in that it is enriched, relative to a substantially racemic preparation of oligonucleotides having the same base sequence, for oligonucleotides of the particular oligonucleotide type,

[0325] the oligonucleotide composition being characterized in that, when it is contacted with the transcript in a single-stranded RNA interference system, RNAi-mediated knockdown of the transcript is improved relative to that observed under reference conditions selected from the group consisting of absence of the composition, presence of a reference composition, and combinations thereof.

[0326] In some embodiments, each of the consecutive nucleoside units is independently preceded and/or followed by a modified internucleotidic linkage. In some embodiments, each of the consecutive nucleoside units is independently preceded and/or followed by a phosphorothioate linkage. In some embodiments, each of the consecutive nucleoside units is independently preceded and/or followed by a chirally controlled modified internucleotidic linkage. In some embodiments, each of the consecutive nucleoside units is independently preceded and/or followed by a chirally controlled phosphorothioate linkage. In some embodiments, a modified internucleotidic linkage has a structure of Formula i. In some embodiments, a modified internucleotidic linkage has a structure of Formula I-a.

[0327] In some embodiments, the present disclosure provides a single-stranded RNAi agent comprising a predetermined level of a first plurality of oligonucleotides, wherein:
[0328] oligonucleotides of the first plurality have the same base sequence;
[0329] oligonucleotides of the first plurality comprise a seed region comprising 2, 3, 4, 5, 6, 7 or more consecutive Sp modified internucleotidic linkages, a post-seed region comprising 2, 3, 4, 5, 6, 7, 8, 9, 10 or more consecutive Sp modified internucleotidic linkages.

[0330] In some embodiments, a seed region comprises 2 or more consecutive Sp modified internucleotidic linkages.

[0331] In some embodiments, a modified internucleotidic linkage has a structure of Formula I. In some embodiments, a modified internucleotidic linkage has a structure of Formula I-a.

[0332] As demonstrated in the present disclosure, in some embodiments, a provided oligonucleotide composition is characterized in that, when it is contacted with the transcript in a single-stranded RNA interference system, RNAi-mediated knockdown of the transcript is improved relative to that observed under reference conditions selected from the group consisting of absence of the composition, presence of a reference composition, and combinations thereof.

[0333] In some embodiments, the present disclosure provides a PNPLA3 oligonucleotide composition comprising a first plurality of oligonucleotides defined by having:
[0334] 1) a common base sequence and length;
[0335] 2) a common pattern of backbone linkages; and
[0336] 3) a common pattern of backbone chiral centers, which composition is a substantially pure preparation of a single oligonucleotide in that a predetermined level of the oligonucleotides in the composition have the common base sequence and length, the common pattern of backbone linkages, and the common pattern of backbone chiral centers.

[0337] In some embodiments, a common base sequence and length may be referred to as a common base sequence. In some embodiments, oligonucleotides having a common base sequence may have the same pattern of nucleoside modifications, e.g., sugar modifications, base modifications, etc. In some embodiments, a pattern of nucleoside, modifications may be represented by a combination of locations and modifications. In some embodiments, a pattern of backbone linkages comprises locations and types (e.g., phosphate, phosphorothioate, substituted phosphorothioate, etc.) of each internucleotidic linkages. A pattern of backbone chiral centers of a PNPLA3 oligonucleotide can be designated by a combination of linkage phosphorus stereochemistry (Rp/Sp) from 5′ to 3′. As exemplified above, locations of non-chiral linkages may be obtained, for example, from pattern of backbone linkages.

[0338] As understood by a person having ordinary skill in the art, a stereorandom or racemic preparation of oligonucleotides is prepared by non-stereoselective and/or low-stereoselective coupling of nucleotide monomers, typically without using any chiral auxiliaries, chiral modification reagents, and/or chiral catalysts. In some embodiments, in a substantially racemic (or chirally uncontrolled) preparation of oligonucleotides, all or most coupling steps are not chirally controlled in that the coupling steps are not specifically conducted to provide enhanced stereoselectivity. An example substantially racemic preparation of oligonucleotides is the preparation of phosphorothioate oligonucleotides through sulfurizing phosphite triesters from commonly used phosphoramidite oligonucleotide synthesis with either tetraethylthiuram disulfide or (TETD) or 3H-1, 2-benzodithiol-3-one 1, 1-dioxide (BDTD), a well-known process in the art. In some embodiments, substantially racemic preparation of oligonucleotides provides substantially racemic oligonucleotide compositions (or chirally uncontrolled oligonucleotide compositions).

[0339] As understood by a person having ordinary skill in the art, in some embodiments, diastereoselectivity of a coupling or a linkage can be assessed through the diastereoselectivity of a dimer formation under the same or comparable conditions, wherein the dimer has the same 5′- and 3′-nucleosides and internucleotidic linkage.

[0340] In some embodiments, the present disclosure provides chirally controlled oligonucleotide composition of a first plurality of oligonucleotides in that the composition is enriched, relative to a substantially racemic preparation of the same oligonucleotides, for oligonucleotides of a single oligonucleotide type. In some embodiments, the present disclosure provides chirally controlled oligonucleotide composition of a first plurality of oligonucleotides in that the composition is enriched, relative to a substantially racemic preparation of the same oligonucleotides, for oligonucleotides of a single oligonucleotide type that share:
[0341] 1) a common base sequence and length;
[0342] 2) a common pattern of backbone linkages; and
[0343] 3) a common pattern of backbone chiral centers.

[0344] In some embodiments, the present disclosure provides a PNPLA3 oligonucleotide composition comprising a first plurality of oligonucleotides capable of directing single-stranded RNA interference, wherein oligonucleotides are of a particular oligonucleotide type characterized by:
[0345] 1) a common base sequence and length;
[0346] 2) a common pattern of backbone linkages; and
[0347] 3) a common pattern of backbone chiral centers;
   which composition is chirally controlled in that it is enriched, relative to a substantially racemic preparation of oligonucleotides having the same base sequence and length, for oligonucleotides of the particular oligonucleotide type.

[0348] In some embodiments, oligonucleotides having a common base sequence and length, a common pattern of backbone linkages, and a common pattern of backbone chiral centers have a common pattern of backbone phosphorus modifications and a common pattern of base modifications. In some embodiments, oligonucleotides having a common base sequence and length, a common pattern of backbone linkages, and a common pattern of backbone chiral centers have a common pattern of backbone phosphorus modifications and a common pattern of nucleoside modifications. In some embodiments, oligonucleotides having a common base sequence and length, a common pattern of backbone linkages, and a common pattern of backbone chiral centers have identical structures.

[0349] In some embodiments, oligonucleotides of a PNPLA3 oligonucleotide type have a common pattern of backbone phosphorus modifications and a common pattern of sugar modifications. In some embodiments, oligonucleotides of a PNPLA3 oligonucleotide type have a common pattern of backbone phosphorus modifications and a common pattern of base modifications. In some embodiments, oligonucleotides of a PNPLA3 oligonucleotide type have a common pattern of backbone phosphorus modifications and a common pattern of nucleoside modifications. In some embodiments, oligonucleotides of an PNPLA3 oligonucleotide type are identical.

[0350] In some embodiments, oligonucleotides having a common base sequence and length, a common pattern of backbone linkages, and a common pattern of backbone chiral centers have a common pattern of backbone phosphorus modifications. In some embodiments, oligonucleotides having a common base sequence and length, a common pattern of backbone linkages, and a common pattern of backbone chiral centers have a common pattern of backbone phosphorus modifications and a common pattern of nucleoside modifications. In some embodiments, oligonucleotides having a common base sequence and length, a common pattern of backbone linkages, and a common pattern of backbone chiral centers have a common pattern of backbone phosphorus modifications and a common pattern of sugar modifications. In some embodiments, oligonucleotides having a common base sequence and length, a common pattern of backbone linkages, and a common pattern of backbone chiral centers have a common pattern of backbone phosphorus modifications and a common pattern of base modifications. In some embodiments, oligonucleotides having a common base sequence and length, a common pattern of backbone linkages, and a common pattern of backbone chiral centers have a common pattern of backbone phosphorus modifications and a common pattern of nucleoside modifications. In some embodiments, oligonucleotides having a common base sequence and length, a common pattern of backbone linkages, and a common pattern of backbone chiral centers are identical.

[0351] In some embodiments, oligonucleotide; in provided compositions have a common pattern of backbone phosphorus modifications. In some embodiments, a common base sequence is a base sequence of an PNPLA3 oligonucleotide type. In some embodiments, a provided composition is an PNPLA3 oligonucleotide composition that is chirally controlled in that the composition contains a predetermined level of a first plurality of oligonucleotides of an individual oligonucleotide type, wherein a PNPLA3 oligonucleotide type is defined by:
[0352] 1) base sequence;
[0353] 2) pattern of backbone linkages;
[0354] 3) pattern of backbone chiral centers; and
[0355] 4) pattern of backbone phosphorus modifications.

[0356] As noted above and understood in the art, in some embodiments, the base sequence of a PNPLA3 oligonucleotide may refer to the identity and/or modification status of nucleoside residues (e.g., of sugar and/or base components, relative to standard naturally occurring nucleotides such as adenine, cytosine, guanosine, thymine, and uracil) in the oligonucleotide and/or to the hybridization character (i.e., the ability to hybridize with particular complementary residues) of such residues.

[0357] In some embodiments, oligonucleotides of a particular type are identical in that they have the same base sequence (including length), the same pattern of chemical modifications to sugar and base moieties, the same pattern of backbone linkages (e.g., pattern of natural phosphate linkages, phosphorothioate linkages, phosphorothioate triester linkages, and combinations thereof), the same pattern of backbone chiral centers (e, g pattern of stereochemistry (Rp/Sp) of chiral internucleotidic linkages), and the same pattern of backbone phosphorus modifications pattern of modifications on the internucleotidic phosphorus atom, such as and -L-R¹ of Formula I).

[0358] Among other things, the present disclosure recognizes that combinations of oligonucleotide structural elements (e.g., patterns of chemical modifications, backbone linkages, backbone chiral centers, and/or backbone phosphorus modifications) can provide surprisingly improved properties such as bioactivities.

[0359] In some embodiments, provided chirally controlled (and/or stereochemically pure) preparations are RNAi agent oligonucleotides.

[0360] In some embodiments, provided chirally controlled (and/or stereochemically pure) preparations are of oligonucleotides that include one or more modified backbone linkages, bases, and/or sugars.

[0361] In some embodiments, provided compositions comprise oligonucleotides containing one or more residues which are modified at the sugar moiety. In some embodiments, provided compositions comprise oligonucleotides containing one or more residues which are modified at the 2′ position of the sugar moiety (referred to herein as a “2′-modification”). Examples of such modifications are described above and herein and include, but are not limited to, 2′-OMe, 2′-MOE, 2′-LNA, 2′4, FRNA, FANA, S-cEt, etc. In some embodiments, provided compositions comprise oligonucleotides containing one or more residues which are 2′-modified. For example, in some embodiments, provided oligonucleotides contain one or more residues which are 22-O-methoxyethyl (2′-MOE)-modified residues. In some embodiments, provided compositions comprise oligonucleotides which do not contain any 2′-modifications. In some embodiments, provided compositions are oligonucleotides which do not contain any 2′-MOE residues. That is, in some embodiments, provided oligonucleotides are not MOE-modified. Additional example sugar modifications are described in the present disclosure.

[0362] In some embodiments, one or more is one. In some embodiments, one or more is two. In some embodiments, one or more is three. In some embodiments, one or more is four. In some embodiments, one or more is five. In some embodiments, one or more is six. In some embodiments, one or more is seven. In some embodiments, one or more is eight. In some embodiments, one or more is nine. In some embodiments, one or more is ten. In some embodiments, one or more is at least one. In some embodiments, one or more is at least two. In some embodiments, one or more is at least three. In some embodiments, one or more is at least four. In some embodiments, one or more is at least five. In some embodiments, one or more is at least six. In some embodiments, one or more is at least seven. In some embodiments, one or more is at least eight. In some embodiments, one or more is at least nine. In some embodiments, one or more is at least ten.

[0363] In some embodiments, a sugar moiety without a 2′-modification is a sugar moiety found in a natural DNA nucleoside.

[0364] A person of ordinary skill in the art understands that various regions of a target transcript can be targeted by provided compositions and methods. In some embodiments, a base sequence of provided oligonucleotides comprises an intron sequence. In some embodiments, a base sequence of provided oligonucleotides comprises an exon sequence. In some embodiments, a base sequence of provided oligonucleotides comprises an intron and an exon sequence.

[0365] As understood by a person having ordinary skill in the art, provided oligonucleotides and compositions, among other things, can target a great number of nucleic acid polymers. For instance, in some embodiments, provided oligonucleotides and compositions may target a transcript of a nucleic acid sequence, wherein a common base sequence of oligonucleotides (e.g., a base sequence of a PNPLA3 oligonucleotide type) comprises or is a sequence complementary to a sequence of the transcript. In some embodiments, a common base sequence comprises a sequence complimentary to a sequence of a target in some embodiments, a common base sequence is a sequence complimentary to a sequence of a target. In some embodiments, a common base sequence comprises or is a sequence 100% complimentary to a sequence of a target, in some embodiments, a common base sequence comprises a sequence 100% complimentary to a sequence of a target. In some embodiments, a common base sequence is a sequence 100% complimentary to a sequence of a target.

[0366] In some embodiments, a common base sequence comprises or is a sequence complementary to a characteristic sequence element. In some embodiments, a common base sequence comprises a sequence complementary to a characteristic sequence element. In some embodiments, a common base sequence is a sequence complementary to a characteristic sequence element. In some embodiments, a common base sequence comprises or is a sequence 100% complementary to a characteristic sequence element. In some embodiments, a common base sequence comprises a sequence 100% complementary to a characteristic sequence element. In some embodiments, a common base sequence is a sequence 100% complementary to a characteristic sequence element. In some embodiments herein, a characteristic sequence element is, as non-limiting examples, a seal region, a post-seed region or a portion of a seed region, or a portion of a post-seed region or a 3′-terminal dinucleotide.

[0367] In some embodiments, a characteristic sequence element comprises or is a mutation. In some embodiments, a characteristic sequence element comprises a mutation. In some embodiments, a characteristic sequence element is a mutation. In some embodiments, a characteristic sequence element comprises or is a point mutation. In some embodiments, a characteristic sequence element comprises point mutation. In some embodiments, a characteristic sequence element is a point mutation. In some embodiments, a characteristic sequence element comprises or is an SNP. In some embodiments, a characteristic sequence element comprises an SNP. In some embodiments, a characteristic sequence element is an SNP.

[0368] In some embodiments, a common base sequence 100% matches a target sequence, which it does not 100% match a similar sequence of the target sequence.

[0369] For example, in some embodiments, a common base sequence matches a mutation in the disease-causing copy or allele of a target nucleic acid sequence, but does not match a non-disease-causing copy or allele at the mutation site; in some other embodiments, a common base sequence matches an SNP in the disease-causing allele of a target nucleic acid sequence, but does not match a non-disease-causing allele at the corresponding site.

[0370] Among other things, the present disclosure recognizes that a base sequence may have impact on oligonucleotide properties. In some embodiments, a base sequence may have impact on cleavage pattern of a target when oligonucleotides having the base sequence are utilized for suppressing a target, e.g., through a pathway involving RNase H: for example, structurally similar (all phosphorothioate linkages, all stereorandom) oligonucleotides have different sequences may have different cleavage patterns.

[0371] In some embodiments, a common base sequence is a base sequence that comprises a SNP.

[0372] As a person having ordinary skill in the art understands, provided oligonucleotide compositions and methods have various uses as known by a person having ordinary skill in the art. Methods for assessing provided compositions, and properties and uses thereof, are also widely known and practiced by a person having ordinary skill in the art. Example properties, uses, and/or methods include but are not limited to those described in WO/2014/012081 and WO/2015/107425.

[0373] In some embodiments, a chiral internucleotidic linkage has the structure of Formula I. In some embodiments, a chiral internucleotidic linkage is phosphorothioate. In some embodiments, each chiral internucleotidic linkage in a single oligonucleotide of a provided composition independently has the structure of Formula I. In some embodiments, each chiral internucleotidic linkage in a single oligonucleotide of a provided composition is a phosphorothioate.

[0374] In some embodiments, oligonucleotides of the present disclosure comprise one or more, modified sugar moieties. In some embodiments, oligonucleotides of the present disclosure comprise one or more modified base moieties. As known by a person of ordinary skill in the art and described in the disclosure, various modifications can be introduced to a sugar and/or moiety. For example, in some embodiments, a modification is a modification described in U.S. Pat. No. 9,006,198, WO2014/012081 and WO/2015/107425, the sugar and base modifications of each of which are incorporated herein by reference.

[0375] In some embodiments, a sugar modification is a 2′-modification. Commonly used 2′-modifications include but are not limited to 2′-OR¹, wherein R¹ is not hydrogen. In some embodiment, a modification is 2′-OR, wherein R is optionally substituted aliphatic. In some embodiments, a modification is 2′-OMe. In some embodiments, a modification is 2′-O-MOE. In some embodiments, the present disclosure demonstrates that inclusion and/or location of particular chirally pure internucleotidic linkages can provide stability improvements comparable to or better than those achieved through use of modified backbone linkages, bases, and/or sugars. In some embodiments, a provided single oligonucleotide of a provided composition has no modifications on the sugars. In some embodiments, a provided single oligonucleotide of a provided composition has no modifications on 2′-positions of the sugars (i.e., the two groups at the 2′-position are either —H/—H or —H/—OH). In some embodiments, a provided single oligonucleotide of a provided composition does not have any 2′-MOE modifications.

[0376] In some embodiments, a 2′-modification is —O-L- or -L- which connects the 2′-capon of a sugar moiety to another carbon of a sugar moiety. In some embodiments, a 2′-modification is —O-L- or which connects the 2′-carbon of a sugar moiety to the 4 ‘-carbon of a sugar moiety. In some embodiments, a 2’-modification is S-cEt. In some embodiments, a modified sugar moiety is an LNA moiety.

[0377] In some embodiments, a 2′-modification is —F. In some embodiments, a 2′-modification is FANA. In some embodiments, a 2′-modification is FRNA.

[0378] In some embodiments, a sugar modification is a 5′-modification, e.g., R-5′-Me, S-5′-Me, etc.

[0379] In some embodiments, a sugar modification changes the size of the sugar ring. In some embodiments, a sugar modification is the sugar moiety in FHNA.

[0380] In some embodiments, a sugar modification replaces a sugar moiety with another cyclic or acyclic moiety: Examples of such moieties are widely known in the art, including but not limited to those used in morpholino (optionally with its phosphorodiamidate linkage), glycol nucleic acids, etc.

[0381] In some embodiments, an ssRNAi agent is or comprises a PNPLA3 oligonucleotide selected from the group consisting of any ssRNAi of any format described in FIG. 1 or otherwise herein. Those skilled in the art, reading the present specification, will appreciate that the present disclosure specifically does not exclude the possibility that any oligonucleotide described herein which is labeled as a ssRNAi agent may also or alternatively operate through another mechanism (e.g., as an antisense oligonucleotide; mediating knock-down via a. RNaseH mechanism; sterically hindering translation; or any other biochemical mechanism).

[0382] In some embodiments, an antisense oligonucleotide (ASO) is or comprises a PNPLA3 oligonucleotide selected from the group consisting of any oligonucleotide of any format described in FIG. 2. Those skilled in the art, reading the present specification, will appreciate that the present disclosure specifically does not exclude the possibility that any oligonucleotide described herein which is labeled as an antisense oligonucleotide (ASO) may also or alternatively operate through another mechanism (e.g., as a ssRNAi utilizing RISC); the disclosure also notes that various ASOs may operate via different mechanisms (utilizing RNaseH, sterically blocking translation or other post-transcriptional processes, changing the conformation of a target nucleic acid, etc.).

[0383] In some embodiments, a hybrid oligonucleotide is or comprises a PNPLA3 oligonucleotide selected from the group consisting of: WV-2111, WV-2113, WV-2114, WV-2148, WV-2149, WV-2152, WV-2153, WV-2156, WV-2157, WV-2387, WV-3069, WV-7523, WV-7524, WV-7525, WV-7526, WV-7527, WV-7528, and any oligonucleotide of any of Formats S40 to S42 of FIG. 1L; or Formats 30-32, 66-69 or 101-103 of FIG. 1. Those skilled in the art, reacting the present specification, will appreciate that the present disclosure specifically does not exclude the possibility that any oligonucleotide described herein which is labeled as a hybrid oligonucleotide may also or alternatively operate through another mechanism (e.g., as an antisense oligonucleotide; mediating knock-down via a RNaseH mechanism; sterically hindering translation; or any other biochemical mechanism),

### Chirally Controlled Oligonucleotides and Chirally Controlled Oligonucleotide Compositions

[0384] In some embodiments, provided oligonucleotides are capable of directing a decrease in the expression and/or level of a target gene or its gene product. In some embodiments, provided oligonucleotides are capable of directing a decrease in the expression and/or level of a target gene or its gene product via RNA interference. In some embodiments, provided oligonucleotides are capable of directing a decrease in the expression and/or level of a target gene or its gene product via a biochemical mechanism which does not involve RNA interference or RISC (including, but not limited to, RNaseH-mediated knockdown or steric hindrance of gene expression). In some embodiments, provided oligonucleotides are capable of directing a decrease in the expression and/or level of a target gene or its gene product via RNA interference and/or RNaseH-mediated knockdown. In some embodiments, provided oligonucleotides are capable of directing a decrease in the expression and/or level of a target gene or its gene product by sterically blocking translation after annealing to a target gene mRNA, and/or by altering or interfering with mRNA splicing and/or exon inclusion or exclusion. In some embodiments, provided oligonucleotides are chirally controlled.

[0385] The present disclosure provides chirally controlled oligonucleotides, and chirally controlled oligonucleotide compositions which are of high crude purity and of high diastereomeric purity. In some embodiments, the present disclosure provides chirally controlled oligonucleotides, and chirally controlled oligonucleotide compositions which are of high crude purity. In some embodiments, the present disclosure provides chirally controlled oligonucleotides, and chirally controlled oligonucleotide compositions which are of high diastereomeric purity.

[0386] In some embodiments, a single-stranded RNAi agent is a substantially pure preparation of an PNPLA3 oligonucleotide type in that oligonucleotides in the composition that are not of the oligonucleotide type are impurities form the preparation process of said oligonucleotide type, in some case, after certain purification procedures.

[0387] In some embodiments, the present disclosure provides oligonucleotides comprising one or more diastereomerically pure internucleotidic linkages with respect to the chiral linkage phosphorus. In some embodiments, the present disclosure provides oligonucleotides comprising one or more diastereomerically pure internucleotidic linkages having the structure of Formula I. In some embodiments, the present disclosure provides oligonucleotides comprising one or more diastereomerically pure internucleotidic linkages with respect to the chiral linkage phosphorus, and one or more phosphate diester linkages. In some embodiments, the present disclosure provides oligonucleotides comprising one or more diastereomerically pure internucleotidic linkages having the structure of Formula I. and one or more phosphate diester linkages. In some embodiments, the present disclosure provides oligonucleotides comprising one or more diastereomerically pure internucleotidic linkages having the structure of Formula I-c, and one or more phosphate diester linkages. In some embodiments, such oligonucleotides are prepared by using stereoselective oligonucleotide synthesis, as described in this application, to form pre-desired diastereomerically pure internucleotidic linkages with respect to the chiral linkage phosphorus. Example internucleotidic linkages, including those having structures of Formula I, are further described below.

[0388] In some embodiments, the present disclosure provides a chirally controlled oligonucleotide, wherein at least two of the individual internucleotidic linkages within the oligonucleotide have different stereochemistry and/or different P-modifications relative to one another.

[0389] Internucleotidic Linkages

[0390] In some embodiments, provided oligonucleotides are capable of directing a decrease in the expression and/or level of a target gene or its gene product. In some embodiments, provided oligonucleotides are capable of directing a decrease in the expression and/or level of a target gene or its gene product via RNA interference. In some embodiments, provided oligonucleotides are capable of directing a decrease in the expression and/or level of a target gene or its gene product via a biochemical mechanism which does not involve RNA interference or RISC (including, but not limited to, RNaseH-mediated knockdown or steric hindrance of gene expression). In some embodiments, provided oligonucleotides are capable of directing a decrease in the expression and/or level of a target gene or its gene product via RNA interference and/or RNaseH-mediated knockdown. In some embodiments, provided oligonucleotides are capable of directing a decrease in the expression and/or level of a target gene or its gene product by sterically blocking translation after annealing to a target gene mRNA, and/or by altering or interfering with mRNA splicing and/or exon inclusion or exclusion. In some embodiments, provided oligonucleotides comprise any internucleotidic linkage described herein or known in the art.

[0391] In some embodiments, an PNPLA3 oligonucleotide, a PNPLA3 oligonucleotide that directs RNA interference, a PNPLA3 oligonucleotide that directs RNase H-mediated knockdown, or a PNPLA3 oligonucleotide that directs both RNA interference and RNase H-mediated knockdown can comprise any internucleotidic linkage described herein or known in the art.

[0392] A non-limiting example of an internucleotidic linkage or unmodified internucleotidic linkage is a phosphodiester; non-limiting examples of modified internucleotidic linkages include those in which one or more oxygen of a phosphodiester has been replaced by, as non-limiting examples, sulfur (as in a phosphorothioate), H, alkyl, or another moiety or element which is not oxygen. A non-limiting example of an internucleotidic linkage is a moiety which does not a comprise a phosphorus but serves to link Iwo sugars. A non-limiting example of an internucleotidic linkage is a moiety which does not a comprise a phosphorus but serves to link two sugars in the backbone of a PNPLA3 oligonucleotide. Disclosed herein are additional non-limiting examples of nucleotides, modified nucleotides, nucleotide analogs, internucleotidic linkages, modified internucleotidic linkages, bases, modified bases, and base analogs, sugars, modified sugars, and sugar analogs, and nucleosides, modified nucleosides, and nucleoside analogs.

[0393] In certain embodiments, a internucleotidic linkage has the structure of Formula I:

[chemical structure]

wherein each variable is as defined and described below. In some embodiments, a linkage of Formula I is chiral. In some embodiments, the present disclosure provides a chirally controlled oligonucleotide comprising one or more modified internucleotidic linkages of Formula I. In some embodiments, the present disclosure provides a chirally controlled oligonucleotide comprising one or more modified internucleotidic linkages of Formula I, and wherein individual internucleotidic linkages of Formula within the oligonucleotide have different P-modifications relative to one another. In some embodiments, the present disclosure provides a chirally controlled oligonucleotide comprising one or more modified internucleotidic linkages of Formula I, and wherein individual internucleotidic linkages of Formula I within the oligonucleotide have different —X-L-R¹ relative to one another. In some embodiments, the present disclosure provides a chirally controlled oligonucleotide comprising one or more modified internucleotidic linkages of Formula I, and wherein individual internucleotidic linkages of Formula I within the oligonucleotide have different X relative to one another. In some embodiments, the present disclosure provides a chirally controlled oligonucleotide comprising one or more modified internucleotidic linkages of Formula I, and wherein individual internucleotidic linkages of Formula I within the oligonucleotide have different -L-R¹ relative to one another. In some embodiments, a chirally controlled oligonucleotide is a PNPLA3 oligonucleotide in a provided composition that is of the particular oligonucleotide type. In some embodiments, a chirally controlled oligonucleotide is a PNPLA3 oligonucleotide in a provided composition that has the common base sequence and length, the common pattern of backbone linkages, and the common pattern of backbone chiral centers. In some embodiments, a chirally controlled oligonucleotide is an PNPLA3 oligonucleotide in a chirally controlled composition that is of the particular oligonucleotide type, and the chirally controlled oligonucleotide is of the type. In some embodiments, a chirally controlled oligonucleotide is a PNPLA3 oligonucleotide in a provided composition that comprises a predetermined level of a plurality of oligonucleotides that share a common base sequence, a common pattern of backbone linkages, and a common pattern of backbone chiral centers, and the chirally controlled oligonucleotide shares the common base sequence, the common pattern of backbone linkages, and the common pattern of backbone chiral centers.

[0394] In some embodiments, a chirally controlled oligonucleotide comprises different internucleotidic phosphorus linkages.

[0395] In some embodiments, a phosphorothioate triester linkage comprises a chiral auxiliary, which, for example, is used to control the stereoselectivity of a reaction. In some embodiments, a phosphorothioate triester linkage does not comprise a chiral auxiliary. In some embodiments, a phosphorothioate triester linkage is intentionally maintained until and/or during the administration to a subject.

[0396] In some embodiments, a chirally controlled oligonucleotide is linked to a solid support. In some embodiments, a chirally controlled oligonucleotide is cleaved from a solid support.

[0397] In some embodiments, a chirally controlled oligonucleotide comprises at least one phosphate diester internucleotidic linkage and at least two consecutive modified internucleotidic linkage s. In some embodiments, a chirally controlled oligonucleotide comprises at least one phosphate diester internucleotidic linkage and at least two consecutive phosphorothioate triester internucleotidic linkages.

[0398] In some embodiments, the present disclosure provides compositions comprising or consisting of a plurality of provided oligonucleotides (e.g., chirally controlled oligonucleotide compositions). In some embodiments, all such provided oligonucleotides are of the same type, i.e., all have the same base sequence, pattern of backbone linkages (i.e., pattern of internucleotidic linkage types, for example, phosphate, phosphorothioate, etc), pattern of backbone chiral centers (i.e. pattern of linkage phosphorus stereochemistry (Rp/Sp)), and pattern of backbone phosphorus modifications (e.g., pattern of “-XLR¹” groups in Formula I, disclosed herein). In some embodiments, all oligonucleotides of the same type are identical. In many embodiments, however, provided compositions comprise a plurality of oligonucleotides types, typically in pre-determined relative amounts.

[0399] In some embodiments, a PNPLA3 oligonucleotide, a PNPLA3 oligonucleotide that directs RNA interference, a PNPLA3 oligonucleotide, that directs RNase H-mediated knockdown, or an PNPLA3 oligonucleotide that directs both RNA interference and RNase H-mediated knockdown can comprise any internucleotidic linkage described herein or known in the art. In some embodiments, a moiety that binds ASPGR is, for example, a GaINAc moiety is any GaINAc, or variant or modification thereof, as described herein or known in the art. In some embodiments, a PNPLA3 oligonucleotide, a PNPLA3 oligonucleotide that directs RNA interference, a PNPLA3 oligonucleotide that directs RNase H-mediated knockdown, or a PNPLA3 oligonucleotide that directs both RNA interference and RNase H-mediated knockdown can comprise any internucleotidic linkage described herein or known in the art in combination with any other structural element or modification described herein, including but not limited to, base sequence or portion thereof, sugar, base (nucleobase); stereochemistry- or pattern thereof, additional chemical moiety, including but not limited to, a targeting moiety, a lipid moiety, a carbohydrate moiety, etc.; seed region; post-seed region; 5′-end structure; 5′-end region; 5′ nucleotide moiety; 3′-end region; 3′-terminal dinucleotide; 3′-end cap; length; additional chemical moiety, including but not limited to, a targeting moiety, lipid a GaINAc, etc.; format or any structural element thereof, and/or any other structural element or modification described herein; and in some embodiments, the present disclosure pertains to multimers of any such oligonucleotides.

[0400] In some embodiments, a chirally controlled oligonucleotide comprises one or more modified internucleotidic phosphorus linkages. In some embodiments, a chi rally controlled oligonucleotide comprises, e.g. a phosphorothioate or a phosphorothioate triester linkage.

[0401] In some embodiments, a modified internucleotidic linkage is phosphorothioate. In some embodiments, a modified internucleotidic linkage is selected from those described in, for example: US 20110294124, US20120316224, US 20140194610, US 20150211006, US 20150197540, WO 2015107425, PCT/US2016/043542, and PCT/US2016/043598, Whittaker et al, 2008 Tetrahedron Letters 49: 6984-6987.

[0402] Non-limiting examples of internucleotidic linkages also include those described in the art, including, but not limited to, those described in any of: Gryaznov, S.; Chen, J.-K, J. Am. Chem. Soc. 1994, 116, 3143, Jones et al. J. Org. Chem. 1993, 58, 2983, Koshkin et al. 1998 Tetrahedron 54: 3607-3630, Lauritsen et al, 2002 Chem, Comm. 5: 530-531, Lauritsen et al. 2003 Bio. Med. Chem. Lett. 13: 253-256, Mesmaeker et al. Angew Chem., ret. Ed. Engl. 1994, 33, 226, Petersen et al. 2003 TRENDS Biotech. 21: 74-81, Schultz et al, 1996 Nucleic Acids Res, 24: 2966, Ts'o et al. Ann. N. Y. Acad. Sci, 1988, 507, 220, and Vasseur et al. J. Am. Chem. Soc. 1992, 114, 4006.

[0403] In some embodiments, the present disclosure provides a chirally controlled oligonucleotide comprising a sequence found in any oligonucleotide disclosed herein. In some embodiments, the present disclosure provides a chirally controlled oligonucleotide comprising a sequence found in any oligonucleotide disclosed herein, wherein one or more U is replaced with T. In some embodiments, the present disclosure provides a chirally controlled oligonucleotide comprising a sequence found in any oligonucleotide disclosed herein, wherein the said sequence has over 50% identity with the sequence of any oligonucleotide disclosed herein.

[0404] In some embodiments, the present disclosure provides a chirally controlled oligonucleotide comprising the sequence of any oligonucleotide disclosed herein. In some embodiments, the present disclosure provides a chirally controlled oligonucleotide having the sequence of any oligonucleotide disclosed herein. In some embodiments, the present disclosure provides a chirally controlled oligonucleotide comprising a sequence found in any oligonucleotide disclosed herein, wherein the oligonucleotides have a pattern of backbone linkages, pattern of backbone chiral centers, and/or pattern of backbone phosphorus modifications described herein.

[0405] In some embodiments, the present disclosure provides a chirally controlled oligonucleotide comprising a sequence found in any oligonucleotide disclosed herein. In some embodiments, the present disclosure provides a chirally controlled oligonucleotide comprising a sequence found in my oligonucleotide disclosed herein, wherein one or more T is substituted with U. In some embodiments, the present disclosure provides a chirally controlled oligonucleotide comprising a sequence found in any oligonucleotide disclosed herein, wherein the said sequence has over 50% identity with the sequence of any oligonucleotide disclosed herein. In some embodiments, the present disclosure provides a chirally controlled oligonucleotide comprising a sequence found in any oligonucleotide disclosed herein, wherein the said sequence has over 60% identity with the sequence of any oligonucleotide disclosed herein. In some embodiments, the present disclosure provides a chirally controlled oligonucleotide comprising a sequence found in any oligonucleotide disclosed herein, wherein the said sequence has over 70% identity with the sequence of any oligonucleotide disclosed herein, in some embodiments, the present disclosure provides a chirally controlled oligonucleotide comprising a sequence found in any oligonucleotide disclosed herein, wherein the said sequence has over 80% identity with the sequence of any oligonucleotide disclosed herein. In some embodiments, the present disclosure provides a chirally controlled oligonucleotide comprising a sequence found in any oligonucleotide disclosed herein, wherein the said sequence has over 90% identity with the sequence of any oligonucleotide disclosed herein. In some embodiments, the present disclosure provides a chirally controlled oligonucleotide comprising a sequence found in any oligonucleotide disclosed herein, wherein the said sequence has over 95% identity with the sequence of any oligonucleotide disclosed herein. In some embodiments, the present disclosure provides a chirally controlled oligonucleotide comprising the sequence of any oligonucleotide disclosed herein. In some embodiments, the present disclosure provides a chirally controlled oligonucleotide having the sequence of any oligonucleotide disclosed herein.

[0406] In some embodiments, the present disclosure provides a chirally controlled oligonucleotide comprising the sequence of any oligonucleotide disclosed herein, wherein at least one internucleotidic linkage is

[chemical structure]

In some embodiments, the present disclosure provides a chirally controlled oligonucleotide comprising the sequence of any oligonucleotide disclosed herein, wherein each internucleotidic linkage is

[chemical structure]

In some embodiments, the present disclosure provides a chirally controlled oligonucleotide having the sequence of any oligonucleotide disclosed herein, wherein at least one internucleotidic linkage is

[chemical structure]

In some embodiments, the present disclosure provides a chirally controlled oligonucleotide having the sequence of any oligonucleotide disclosed herein, wherein each internucleotidic linkage is

[chemical structure]

In some embodiments, the present disclosure provides chirally controlled oligonucleotide having the sequence of any oligonucleotide disclosed herein, wherein each cytosine is optionally and independently replaced by 5-methyl cytosine. In some embodiments, the present disclosure provides a chirally controlled oligonucleotide having the sequence of any oligonucleotide disclosed herein, wherein at least one cytosine is optionally and independently replaced by 5-methylcytosine. In some embodiments, the present disclosure provides a chirally controlled oligonucleotide having the sequence of any oligonucleotide disclosed herein, wherein each cytosine is optionally and independently replaced by 5-methylcytosine.

[0407] Bases (Nucleobases)

[0408] In some embodiments, provided oligonucleotides are capable of directing a decrease in the expression and/or level of a target gene or its gene product. In some embodiments, provided oligonucleotides are capable of directing a decrease in the expression and/or level of a target gene or its gene product via RNA interference. In some embodiments, provided oligonucleotides are capable of directing a decrease in the expression and/or level of a target gene or its gene product via a biochemical mechanism which does not involve RNA interference or RISC (including, but not limited to RNaseH-mediated knockdown or steric hindrance of gene expression). In some embodiments, provided oligonucleotides are capable of directing a decrease in the expression and/or level of a target gene or its gene product via RNA interference and/or RNaseH-mediated knockdown. In some embodiments, provided oligonucleotides are capable of directing a decrease in the expression and/or level of a target gene or its gene product by sterically blocking translation after annealing to a target gene mRNA, and/or by altering or interfering with mRNA splicing and/or ex on inclusion or exclusion. In some embodiments, provided oligonucleotides comprise any nucleobase described herein or known in the art.

[0409] In some embodiments, a nucleobase present in a provided oligonucleotide is a natural nucleobase or a modified nucleobase derived from a natural nucleobase. Examples include, but are not limited to, uracil, thymine, adenine, cytosine, and guanine having their respective amino groups protected by acyl protecting groups, 2-fluorouracil, 2-fluorocytosine, 5-bromouracil, 5-iodouracil, 2,6-diaminopurine, azacytosine, pyrimidine analogs such as pseudoisocytosine and pseudouracil and other modified nucleobases such as 8-substituted purines, xanthine, or hypoxanthine (the latter two being the natural degradation products). Example modified nucleobases are disclosed in Chiu and Rana, RNA, 2003, 9, 1034-1048, Limbach et al. Nucleic Acids Research, 1994, 22, 2183-2196 and Revankar and Rao, Comprehensive Natural Products Chemistry, vol. 7, 313. In some embodiments, a modified nucleobase is substituted uracil, thymine, adenine, cytosine, or guanine. In some embodiments, a modified nucleobase is a functional replacement, e.g., in terms of hydrogen bonding and/or base pairing, of uracil, thy mine, adenine, cytosine, or guanine. In some embodiments, a nucleobase is optionally substituted uracil, thymine, adenine, cytosine, 5-methylcytosine, or guanine. In some embodiments, a nucleobase is uracil, thymine, adenine, cytosine, 5-methylcytosine, or guanine.

[0410] In some embodiments, a modified base is optionally substituted adenine, cytosine, guanine, thymine, or uracil. In some embodiments, a modified nucleobase is independently adenine, cytosine, guanine, thymine or uracil, modified by one or more modifications by which:
[0411] (1) a nucleobase is modified by one or more optionally substituted groups independently selected from acyl, halogen, amino, azide, alkyl, alkenyl, alkynyl, aryl, heteroalkyl, heteroalkenyl, heteroalkynyl, heterocyclyl, heteroaryl, carboxyl, hydroxyl, biotin, avidin, streptavidin, substituted silyl, and combinations thereof;
[0412] (2) one or more atoms of a nucleobase are independently replaced with a different atom selected from carbon, nitrogen and sulfur;
[0413] (3) one or more double bonds in a nucleobase are independently hydrogenated, or
[0414] (4) one or more aryl or heteroaryl rings are independently inserted into a nucleobase.

[0415] Various additional nucleobases are described in the art.

[0416] Sugars

[0417] In some embodiments, provided oligonucleotides are capable of directing a decrease in the expression and/or level of a target gene or its gene product. In some embodiments, provided oligonucleotides are capable of directing a decrease in the expression and/or level of a target gene or its gene product via RNA interference. In some embodiments, provided oligonucleotides are capable of directing a decrease in the expression and/or level of a target gene or its gene product via a biochemical mechanism which does not involve RNA interference or RISC (including, but not limited to, RNaseH-mediated knockdown or steric hindrance of gene expression). In some embodiments, provided oligonucleotides are capable of directing a decrease in the expression and/or level of a target gene or its gene product via RNA interference and/or RNaseH-mediated knockdown. In some embodiments, provided oligonucleotides are capable of directing a decrease in the expression and/or level of a target gene or its gene product by sterically blocking translation after annealing to a target gene mRNA, and/or by altering or interfering with mRNA splicing and/or exon inclusion or exclusion. In some embodiments, provided oligonucleotides comprise any sugar described herein or known in the art.

[0418] In some embodiments, provided oligonucleotides capable of directing single-stranded. RNA interference comprise one or more modified sugar moieties beside the natural sugar moieties.

[0419] The most common naturally occurring nucleotides are comprised of ribose sugars linked to the nucleobases adenosine (A), cytosine (C), guanine (G), and thymine (T) or uracil (U). Also contemplated are modified nucleotides wherein a phosphate group or linkage phosphorus in the nucleotides can be linked to various positions of a sugar or modified sugar. As non-limiting examples, the phosphate group or linkage phosphorus can be linked to the 2″, 3″, 4″ or 5″ hydroxyl moiety of a sugar or modified sugar. Nucleotides that incorporate modified nucleobases as described herein are also contemplated in this context. In some embodiments, nucleotides or modified nucleotides comprising an unprotected —OH moiety are used in accordance with methods of the present disclosure.

[0420] In some embodiments, a PNPLA3 oligonucleotide, a PNPLA3 oligonucleotide that directs RNA interference, a PNPLA3 oligonucleotide that directs RNase H-mediated knockdown, or a PNPLA3 oligonucleotide that directs both RNA interference and RNase H-mediated knockdown can comprise any base (nucleobase), modified base or base analog described herein or known in the art. In some embodiments, a PNPLA3 oligonucleotide, a. PNPLA3 oligonucleotide that directs RNA interference, an PNPLA3 oligonucleotide that directs RNase H-mediated knockdown, or a PNPLA3 oligonucleotide that directs both RNA interference and RNase H-mediated knockdown can comprise any base described herein or known in the art in combination with any other structural element or modification described herein, including but not limited to, base sequence or portion thereof, sugar; internucleotidic linkage; stereochemistry or pattern thereof; additional chemical moiety, including but not limited to, a targeting moiety, lipid moiety, a GaINAc moiety, etc.; 5′-end structure; 5′-end region; 5′ nucleotide moiety; seed region; post-seed region; 3′-end region; 3′-terminal dinucleotide; 3′-end cap; pattern of modifications of sugars, bases or internucleotidic linkages; format or any structural element thereof, and/or any other structural element or modification described herein; and in some embodiments, the present disclosure pertains to multimers of any such oligonucleotides.

[0421] In some embodiments, a PNPLA3 oligonucleotide, a PNPLA3 oligonucleotide that directs RNA interference, a PNPLA3 oligonucleotide that directs RNase H-mediated knockdown, or a PNPLA3 oligonucleotide that directs both RNA interference and RNase H-mediated knockdown can comprise any sugar.

[0422] Various additional sugars are described in the art.

[0423] Base Sequence of a PNPLA3 Oligonucleotide

[0424] In some embodiments, provided oligonucleotides are capable of directing a decrease in the expression and/or level of a target gene or its gene product. In some embodiments, provided oligonucleotides are capable of directing a decrease in the expression and/or level of a target gene or its gene product via RNA interference. In some embodiments, provided oligonucleotides are capable of directing a decrease in the expression and/or level of a target gene or its gene product via a biochemical mechanism which does not involve RNA interference or RISC (including, but not limited to, RNaseH-mediated knockdown or steric hindrance of gene expression). In some embodiments, provided oligonucleotides are capable of directing a decrease in the expression and/or level of a target gene or its gene product via RNA interference and/or RNaseH-mediated knockdown. In some embodiments, provided oligonucleotides are capable of directing a decrease in the expression and/or level of a target gene or its gene product by sterically blocking translation after annealing to a target gene mRNA, and/or by altering or interfering with mRNA splicing and/or exon inclusion or exclusion. In some embodiments, provided oligonucleotides can comprise any base sequence or portion thereof, described herein, wherein a portion is a span of at least 15 contiguous bases, or a span of at least 15 contiguous bases with 1-5 mismatches.

[0425] In some embodiments, a PNPLA3 oligonucleotide, a PNPLA3 oligonucleotide that directs RNA interference, a PNPLA3 oligonucleotide that directs RNase H-meditated knockdown, or an PNPLA3 oligonucleotide that directs both RNA interference and RNase H-mediated knockdown can comprise any base sequence described herein, in some embodiments, a PNPLA3 oligonucleotide, a PNPLA3 oligonucleotide that directs RNA interference, a PNPLA3 oligonucleotide that directs RNase H-mediated knockdown, or a PNPLA3 oligonucleotide that directs both RNA interference and RNase H-mediated knockdown can comprise any base sequence or portion thereof, described herein, in some embodiments, a PNPLA3 oligonucleotide, a PNPLA3 oligonucleotide that directs RNA interference, a PNPLA3 oligonucleotide that directs RNase H-mediated knockdown, or a PNPLA3 oligonucleotide that directs both RNA interference and RNase H-mediated knockdown can comprise any base sequence or portion thereof, described herein, wherein a portion is a span of 15 contiguous bases, or a span of 15 contiguous bases with 1-5 mismatches.

[0426] The sequence of a single-stranded RNAi agent has a sufficient length and identity to a transcript target to mediate target-specific RNA interference. In some embodiments, the RNAi agent is complementary to a portion of a transcript target sequence.

[0427] The base sequence of a single-stranded RNAi agent is complementary to that of a target transcript. As used herein, “target transcript sequence,” “target sequence”, “target gene”, and the like, refer to a contiguous portion of the nucleotide sequence of an mRNA molecule formed during the transcription of a gene, e.g., a target gene, including mRNA that is a product of RNA processing of a primary transcription product.

[0428] The terms “complementary,” “fully complementary” and “substantially complementary” herein may be used with respect to the base matching between the strand of a single-stranded RNAi agent and a target sequence or between an antisense oligonucleotide and a target sequence, as will be understood from the context of their use. A strand of a single-stranded RNAi agent or antisense oligonucleotide or other oligonucleotide is complementary to that of a target sequence when each base of the single-stranded. RNAi agent, antisense oligonucleotide or other oligonucleotide is capable of base-pairing with a sequential base on the target strand, when maximally aligned. As a non-limiting example, if a target sequence has, for example, a base sequence of 5-GCALIAGCGAGCGAGGGAAAAC-3 (SEQ ID NO: 1), a PNPLA3 oligonucleotide with a base sequence of 5′GUITUUCCCUCGCUCGCUAUGC-3′ (SEQ ID NO: 2) is complementary or fully complementary to such a target sequence. It is noted, of course, that substitution of T for or vice versa, does not alter the amount of complementarity.

[0429] As used herein, a polynucleotide that is “substantially complementary” to a target sequence is largely or mostly complementary but not 100% complementary. In some embodiments, a sequence (e.g., a strand of a single-stranded RNAi agent or an antisense oligonucleotide) which is substantially complementary has 1, 2, 3, 4 or 5 mismatches from a sequence which is 100% complementary to the target sequence. In the case of a single-stranded RNAi agent, this disclosure notes that the 5′ terminal nucleotide (N1) in many cases has a mismatch from the complement of a target sequence. Similarly, in a single-stranded RNAi agent, the 3′-terminal dinucleotide, if present, can be a mismatch from the complement of the target sequence. As a non-limiting example, if a target sequence has, for example, a base sequence of 5′-GCALJAGCCIAGCGAGGGAAAAC-3′ (SEQ ID NO: 3), a single-stranded RNAi agent with a base sequence of 5′TUUUUCCCUCGCUCGCUAUTU-3′ (SEQ ID NO: 4) is substantially complementary to such a target sequence.

[0430] The present disclosure presents, in Table 1 A and elsewhere, various single-stranded RNAi agents and antisense oligonucleotides and other oligonucleotides, each of which has a defined base sequence. In some embodiments, the disclosure encompasses any oligonucleotide having a base sequence which is, comprises, or comprises a portion of the base sequence of any various single-stranded RNAi agent, antisense oligonucleotide and other oligonucleotide disclosed herein. In some embodiments, the disclosure encompasses any oligonucleotide having a base sequence which is, comprises, or comprises a portion of the base sequence of any various single-stranded RNAi agent, antisense oligonucleotide and other oligonucleotide disclosed herein, which has any chemical modification, stereochemistry, format, structural feature (e.g., if the oligonucleotide is a single-stranded RNAi agent, the 5′-end structure, 5′-end region, 5′ nucleotide moiety, seed region, post-seed region, 3′-end region. 3′-terminal dinucleotide, cap, or any structure, pattern or portion thereof), and/or any other modification described herein (e.g., conjugation with another moiety, such as a targeting moiety, carbohydrate moiety, a GalNAc moiety, lipid moiety, etc.; anchor multimerization).

[0431] In some embodiments, a PNPLA3 oligonucleotide has a base sequence which is, comprises or comprises a portion of the base sequence of any oligonucleotide disclosed herein.

[0432] In some embodiments, the present disclosure discloses an PNPLA3 oligonucleotide of a sequence recited herein. In some embodiments, the present disclosure discloses an PNPLA3 oligonucleotide of a sequence recited herein, wherein the oligonucleotide is capable of directing a decrease in the expression and/or level of a target gene or its gene product. In some embodiments, an PNPLA3 oligonucleotide of a recited sequence is a single-stranded RNAi agent, in some embodiments, a PNPLA3 oligonucleotide of a recited sequence is an antisense oligonucleotide which directs RNase H-mediated knockdown. In some embodiments, a PNPLA3 oligonucleotide of a recited sequence directs both. RNA interference and RNase H-mediated knockdown. In some embodiments, a PNPLA3 oligonucleotide of a recited sequence comprises any structure described herein (e.g., any 5′-end structure, 5′-end region, 5′ nucleotide moiety, seed region, post-seed region, 3′-terminal dinucleotide, 3′-end cap, or any portion of any of these structures, or any chemistry, stereochemistry, additional chemical moiety, etc., described herein). If the oligonucleotide is a ssRNAi agent, the sequence can be preceded by a T (as a non-limiting example, a 2′-deoxy T, 5′-(R)-Me OH T, 5′-(R)-Me PO T, 5′-(R)-Me PS T, 5′-(R)-Me PH T, 5′-(5)-Me OH T, —(S)-Me PO T, 5′-(S)-Me PS T, or 5′-(S)—PH T) or the first nucleobase is replaced by a T (as a non-limiting example, a 2′-deoxy T, 5′-(R)-Me OH T. 5′-(R)-Me PO T, 5′-(R)-Me PS T, 5′-(R)-Me PH T, 5′-(S)-Me OH T, 5′-(S)-Me PO T, 5′-(S)-Me PS T, or 5′-(S)—PH T) and/or followed by a 3′-terminal dinucleotide (e.g., as non-limiting examples: TT, UU, TU, etc.). In various sequences, U can be replaced by T or vice versa, or a sequence can comprise a mixture of U and T. In some embodiments, a PNPLA3 oligonucleotide has a length of no more than about 49, 45, 40, 30, 35, 25, 23 total nucleotides. In some embodiments, a portion is a span of at least 15, 16, 17, 18, 19, 20, 21, 22, 23, 24, or 25 total nucleotides with 0-3 mismatches. In some embodiments, a portion is a span of at least 15, 16, 17, 18, 19, 20, 21, 22, 23, 24, or 25 total nucleotides with 0-3 mismatches, wherein a span with 0 mismatches is complementary and a span with 1 or more mismatches is a non-limiting example of substantial complementarily. In some embodiments, wherein the sequence recited above starts with a U at the 5′-end, the U can be deleted and/or replaced by another base. In some embodiments, the disclosure encompasses any oligonucleotide having a base sequence which is or comprises or comprises a portion of the base sequence of any oligonucleotide disclosed herein, which has a format or a portion of a format disclosed herein.

[0433] In some embodiments, a PNPLA3 oligonucleotide, an PNPLA3 oligonucleotide that directs RNA interference, a PNPLA3 oligonucleotide that directs RNase H-mediated knockdown, or a PNPLA3 oligonucleotide that directs both RNA interference and RNase H-mediated knockdown can comprise any base sequence described herein. In some embodiments, a PNPLA3 oligonucleotide, a. PNPLA3 oligonucleotide that directs RNA interference, a PNPLA3 oligonucleotide that directs RNase H-mediated knockdown, or a PNPLA3 oligonucleotide that directs both RNA interference and RNase H-mediated knockdown can comprise any base sequence or portion thereof, described herein. In some embodiments, a PNPLA3 oligonucleotide, a PNPLA3 oligonucleotide that directs RNA interference, a PNPLA3 oligonucleotide that directs RNase H-mediated knockdown, or a PNPLA3 oligonucleotide that directs both RNA interference and RNase H-mediated knockdown can comprise any base sequence or portion thereof, described herein, wherein a portion is a span of 15 contiguous bases, or a span of 15 contiguous bases with 1-5 mismatches. In some embodiments, a PNPLA3 oligonucleotide, are PNPLA3 oligonucleotide that directs RNA interference, an PNPLA3 oligonucleotide that directs RNase H-mediated knockdown, or an PNPLA3 oligonucleotide that directs both RNA interference and RNase H-mediated knockdown can comprise any base sequence or portion thereof described herein in combination with any other structural element or modification described herein, including but not limited to, sugar, base; internucleotidic linkage; stereochemistry or pattern thereof; additional chemical moiety, including but not limited to, a targeting moiety, lipid moiety, a GalNAc moiety, etc.; 5′-end structure; 5′-end region; 5′ nucleotide moiety; seed region; post-seed region; 3′-end region; 3′-terminal dinucleotide; 3′-end cap; pattern of modifications of sugars, bases or internucleotidic linkages; format or any structural element thereof, and/or any other structural element or modification described herein; and in some embodiment, the present disclosure pertains to mill timers of any such oligonucleotides.

[0434] Non-limiting examples of oligonucleotides having various base sequences are disclosed in Table 1A, below

TABLE 1A
Oligonucleotides.
PNPLA3 oligonucleotides.

| WAVE | | SEQ ID | | | |
|---|---|---|---|---|---|
| ID | Naked Sequence | NO: | Sequence | | Stereochemistry |
| WV- | AAGGGCATGAAGCAGGAACA | 5 | mA*mAmGmGmG*C*A*T*G*A*A*G*C*A*G* | | XOOOXXXXXXXXXXXOOOX |
| 3367 | | | mGmAmAmC*mA | | |
| WV- | GAAGGGCATGAAGCAGGAAC | 6 | mG*mAmAmGmG*G*C*A*T*G*A*A*G*C*A* | | XOOOXXXXXXXXXXXOOOX |
| 3368 | | | mGmGmAmA*mC | | |
| WV- | AGAAGGGCATGAAGCAGGAA | 7 | mA*mGmAmAmG*G*G*C*A*T*G*A*A*G*C* | | XOOOXXXXXXXXXXXOOOX |
| 3369 | | | mAmGmGmA*mA | | |
| WV- | UAGAAGGGCATGAAGCAGGA | 8 | mU*mAmGmAmA*G*G*G*C*A*T*G*A*A*G* | | XOOOXXXXXXXXXXXOOOX |
| 3370 | | | mCmAmGmG*mA | | |
| WV- | GUAGAAGGGCATGAAGCAGG | 9 | mG*mUmAmGmA*A*G*G*G*C*A*T*G*A*A* | | XOOOXXXXXXXXXXXOOOX |
| 3371 | | | mGmCmAmG*mG | | |
| WV- | UGUAGAAGGGCATGAAGCAG | 10 | mU*mGmUmAmG*A*A*G*G*G*C*A*T*G*A* | | XOOOXXXXXXXXXXXOOOX |
| 3372 | | | mAmGmCmA*mG | | |
| WV- | CUGUAGAAGGGCATGAAGCA | 11 | mC*mUmGmUmA*G*A*A*G*G*G*C*A*T*G* | | XOOOXXXXXXXXXXXOOOX |
| 3373 | | | mAmAmGmC*mA | | |
| WV- | ACUGUAGAAGGGCATGAAGC | 12 | mA*mCmUmGmU*A*G*A*A*G*G*G*C*A*T* | | XOOOXXXXXXXXXXXOOOX |
| 3374 | | | mGmAmAmG*mC | | |
| WV- | CACUGTAGAAGGGCAUGAAG | 13 | mC*mAmCmUmG*T*A*G*A*A*G*G*G*C*A* | | XOOOXXXXXXXXXXXOOOX |
| 3375 | | | mUmGmAmA*mG | | |
| WV- | CCACUGTAGAAGGGCAUGAA | 14 | mC*mCmAmCmU*G*T*A*G*A*A*G*G*G*C* | | XOOOXXXXXXXXXXXOOOX |
| 3376 | | | mAmUmGmA*mA | | |
| WV- | UUCCGACTCCTGGCCUUCCG | 15 | mU*mUmCmCmG*A*C*T*C*C*T*G*G*C*C* | | XOOOXXXXXXXXXXXOOOX |
| 3377 | | | mUmUmCmC*mG | | |
| WV- | UCCGACTCCTGGCCTUCCGC | 16 | mU*mCmCmGmA*C*T*C*C*T*G*G*C*C*T* | | XOOOXXXXXXXXXXXOOOX |
| 3378 | | | mUmCmCmG*mC | | |
| WV- | CCGACTCCTGGCCTTCCGCA | 17 | mC*mCmGmAmC*T*C*C*T*G*G*C*C*T*T* | | XOOOXXXXXXXXXXXOOOX |
| 3379 | | | mCmCmGmC*mA | | |
| WV- | ACCUGAGGATGGACCGCGGG | 18 | mA*mCmCmUmG*A*G*G*A*T*G*G*A*C*C* | | XOOOXXXXXXXXXXXOOOX |
| 3380 | | | mGmCmGmG*mG | | |
| WV- | UGUGCTTGGCTCCTGCCUGG | 19 | mU*mGmUmGmC*T*T*G*G*C*T*C*C*T*G* | | XOOOXXXXXXXXXXXOOOX |
| 3381 | | | mCmCmUmG*mG | | |
| WV- | CUGGACCTGAGGATGGACCG | 20 | mC*mUmGmGmA*C*C*T*G*A*G*G*A*T*G* | | XOOOXXXXXXXXXXXOOOX |
| 3382 | | | mGmAmCmC*mG | | |
| WV- | UGUUCCGACTCCTGGCCUUC | 21 | mU*mGmUmUmC*C*G*A*C*T*C*C*T*G*G* | | XOOOXXXXXXXXXXXOOOX |
| 3383 | | | mCmCmUmU*mC | | |
| WV- | GUUCCGACTCCTGGCCUUCC | 22 | mG*mUmUmCmC*G*A*C*T*C*C*T*G*G*C* | | XOOOXXXXXXXXXXXOOOX |
| 3384 | | | mCmUmUmC*mC | | |
| WV- | CGACUCCTGGCCTTCCGCAC | 23 | mC*mGmAmCmU*C*C*T*G*G*C*C*T*T*C* | | XOOOXXXXXXXXXXXOOOX |
| 3385 | | | mCmGmCmA*mC | | |
| WV- | CCUGCTGTGCTTGGCUCCUG | 24 | mC*mCmUmGmC*T*G*T*G*C*T*T*G*G*C* | | XOOOXXXXXXXXXXXOOOX |
| 3386 | | | mUmCmCmU*mG | | |
| WV- | UCUUGTTACCCCCGCCAUGG | 25 | mU*mCmUmUmG*T*T*A*C*C*C*C*C*G*C* | | XOOOXXXXXXXXXXXOOOX |
| 3387 | | | mCmAmUmG*mG | | |
| WV- | CCUGCCTCAGTGTCTCGGCC | 26 | mC*mCmUmGmC*C*T*C*A*G*T*G*T*C*T* | | XOOOXXXXXXXXXXXOOOX |
| 3388 | | | mCmGmGmC*mC | | |
| WV- | CCCUGCCTCAGTGTCUCGGC | 27 | mC*mCmCmUmG*C*C*T*C*A*G*T*G*T*C* | | XOOOXXXXXXXXXXXOOOX |
| 3389 | | | mUmCmGmG*mC | | |
| WV- | UUACCCCCGCCATGGAGACG | 28 | mU*mUmAmCmC*C*C*C*G*C*C*A*T*G*G* | | XOOOXXXXXXXXXXXOOOX |
| 3390 | | | mAmGmAmC*mG | | |
| WV- | ACCCCCGCCATGGAGACGUU | 29 | mA*mCmCmCmC*C*G*C*C*A*T*G*G*A*G* | | XOOOXXXXXXXXXXXOOOX |
| 3391 | | | mAmCmGmU*mU | | |
| WV- | GACCUGAGGATGGACCGCGG | 30 | mG*mAmCmCmU*G*A*G*G*A*T*G*G*A*C* | | XOOOXXXXXXXXXXXOOOX |
| 3392 | | | mCmGmCmG*mG | | |
| WV- | GGACCTGAGGATGGACCGCG | 31 | mG*mGmAmCmC*T*G*A*G*G*A*T*G*G*A* | | XOOOXXXXXXXXXXXOOOX |
| 3393 | | | mCmCmGmC*mG | | |
| WV- | UACCCCCGCCATGGAGACGU | 32 | mU*mAmCmCmC*C*C*G*C*C*A*T*G*G*A* | | XOOOXXXXXXXXXXXOOOX |
| 3394 | | | mGmAmCmG*mU | | |
| WV- | GGGACCCTCTGCACTGGGCU | 33 | mG*mGmGmAmC*C*C*T*C*T*G*C*A*C*T* | | XOOOXXXXXXXXXXXOOOX |
| 3395 | | | mGmGmGmC*mU | | |
| WV- | CCUGGGCGAGAGGGTGUCCA | 34 | mC*mCmUmGmG*G*C*G*A*G*A*G*G*G*T* | | XOOOXXXXXXXXXXXOOOX |
| 3396 | | | mGmUmCmC*mA | | |
| WV- | CCCCCGCCATGGAGACGUUU | 35 | mC*mCmCmCmC*G*C*C*A*T*G*G*A*G*A* | | XOOOXXXXXXXXXXXOOOX |
| 3397 | | | mCmGmUmU*mU | | |
| WV- | UCUGCTGGACAGCCCUUGGG | 36 | mU*mCmUmGmC*T*G*G*A*C*A*G*C*C*C* | | XOOOXXXXXXXXXXXOOOX |
| 3398 | | | mUmUmGmG*mG | | |
| WV- | CUGCACTGGGCTTCCUGGUG | 37 | mC*mUmGmCmA*C*T*G*G*G*C*T*T*C*C* | | XOOOXXXXXXXXXXXOOOX |
| 3399 | | | mUmGmGmU*mG | | |
| WV- | UCCUGCTGTGCTTGGCUCCU | 38 | mU*mCmCmUmG*C*T*G*T*G*C*T*T*G*G* | | XOOOXXXXXXXXXXXOOOX |
| 3400 | | | mCmUmCmC*mU | | |
| WV- | CUCCUGCTGTGCTTGGCUCC | 39 | mC*mUmCmCmU*G*C*T*G*T*G*C*T*T*G* | | XOOOXXXXXXXXXXXOOOX |
| 3401 | | | mGmCmUmC*mC | | |
| WV- | UGGACCTGAGGATGGACCGC | 40 | mU*mGmGmAmC*C*T*G*A*G*G*A*T*G*G* | | XOOOXXXXXXXXXXXOOOX |
| 3402 | | | mAmCmCmG*mC | | |
| WV- | UACCCTGCCTCAGTGUCUCG | 41 | mU*mAmCmCmC*T*G*C*C*T*C*A*G*T*G* | | XOOOXXXXXXXXXXXOOOX |
| 3403 | | | mUmCmUmC*mG | | |
| WV- | AGGGACCCTCTGCACUGGGC | 42 | mA*mGmGmGmA*C*C*C*T*C*T*G*C*A*C* | | XOOOXXXXXXXXXXXOOOX |
| 3404 | | | mUmGmGmG*mC | | |
| WV- | CUCAGGCAGCGGGTCGCCCC | 43 | mC*mUmCmAmG*G*C*A*G*C*G*G*G*T*C* | | XOOOXXXXXXXXXXXOOOX |
| 3405 | | | mGmCmCmC*mC | | |
| WV- | CCUCAGTGTCTCGGCCAGGG | 44 | mC*mCmUmCmA*G*T*G*T*C*T*C*G*G*C* | | XOOOXXXXXXXXXXXOOOX |
| 3406 | | | mCmAmGmG*mG | | |
| WV- | AUUUGGGACCTGGAGGCGGG | 45 | mA*mUmUmUmG*G*G*A*C*C*T*G*G*A*G* | | XOOOXXXXXXXXXXXOOOX |
| 3407 | | | mGmCmGmG*mG | | |
| WV- | CUUGUTACCCCCGCCAUGGA | 46 | mC*mUmUmGmU*T*A*C*C*C*C*C*G*C*C* | | XOOOXXXXXXXXXXXOOOX |
| 3408 | | | mAmUmGmG*mA | | |
| WV- | ACAUGGGCCAGCCTACCCCC | 47 | mA*mCmAmUmG*G*G*C*C*A*G*C*C*T*A* | | XOOOXXXXXXXXXXXOOOX |
| 3409 | | | mCmCmCmC*mC | | |
| WV- | UGCUGTGCTTGGCTCCUGCC | 48 | mU*mGmCmUmG*T*G*C*T*T*G*G*C*T*C* | | XOOOXXXXXXXXXXXOOOX |
| 3410 | | | mCmUmGmC*mC | | |
| WV- | ACCUGTGAGGTCACCCACUG | 49 | mA*mCmCmUmG*T*G*A*G*G*T*C*A*C*C* | | XOOOXXXXXXXXXXXOOOX |
| 3411 | | | mCmAmCmU*mG | | |
| WV- | AUGUUCCGACTCCTGGCCUU | 50 | mA*mUmGmUmU*C*C*G*A*C*T*C*C*T*G* | | XOOOXXXXXXXXXXXOOOX |
| 3412 | | | mGmCmCmU*mU | | |
| WV- | CUCUGCTGGACAGCCCUUGG | 51 | mC*mUmCmUmG*C*T*G*G*A*C*A*G*C*C* | | XOOOXXXXXXXXXXXOOOX |
| 3413 | | | mCmUmUmG*mG | | |
| WV- | GCCUGGGCGAGAGGGUGUCC | 52 | mG*mCmCmUmG*G*G*C*G*A*G*A*G*G*G* | | XOOOXXXXXXXXXXXOOOX |
| 3414 | | | mUmGmUmC*mC | | |
| WV- | CUGGUGGACATTGGCCGGGA | 53 | mC*mUmGmGmU*G*G*A*C*A*T*T*G*G*C* | | XOOOXXXXXXXXXXXOOOX |
| 3415 | | | mCmGmGmG*mA | | |
| WV- | CUGCUCCAGCGGGATACCGG | 54 | mC*mUmGmCmU*C*C*A*G*C*G*G*G*A*T* | | XOOOXXXXXXXXXXXOOOX |
| 3416 | | | mAmCmCmG*mG | | |
| WV- | UUGUUACCCCCGCCAUGGAG | 55 | mU*mUmGmUmU*A*C*C*C*C*C*G*C*C*A* | | XOOOXXXXXXXXXXXOOOX |
| 3417 | | | mUmGmGmA*mG | | |
| WV- | UGUUACCCCCGCCATGGAGA | 56 | mU*mGmUmUmA*C*C*C*C*C*G*C*C*A*T* | | XOOOXXXXXXXXXXXOOOX |
| 3418 | | | mGmGmAmG*mA | | |
| WV- | AGCGCTCTCTACCCTGCCUC | 57 | mA*mGmCmGmC*T*C*T*C*T*A*C*C*C*T* | | XOOOXXXXXXXXXXXOOOX |
| 3419 | | | mGmCmCmU*mC | | |
| WV- | UGGGCGAGAGGGTGTCCAGG | 58 | mU*mGmGmGmC*G*A*G*A*G*G*G*T*G*T* | | XOOOXXXXXXXXXXXOOOX |
| 3420 | | | mCmCmAmG*mG | | |
| WV- | AGGCUGGGATCCTCCACGUC | 59 | mA*mGmGmCmU*G*G*G*A*T*C*C*T*C*C* | | XOOOXXXXXXXXXXXOOOX |
| 3421 | | | mAmCmGmU*mC | | |
| WV- | UGGUGGACATTGGCCGGGAG | 60 | mU*mGmGmUmG*G*A*C*A*T*T*G*G*C*C* | | XOOOXXXXXXXXXXXOOOX |
| 3422 | | | mGmGmGmA*mG | | |
| WV- | AGAGGCTGGGATCCTCCACG | 61 | mA*mGmAmGmG*C*T*G*G*G*A*T*C*C*T* | | XOOOXXXXXXXXXXXOOOX |
| 3423 | | | mCmCmAmC*mG | | |
| WV- | GCUGGTGGACATTGGCCGGG | 62 | mG*mCmUmGmG*T*G*G*A*C*A*T*T*G*G* | | XOOOXXXXXXXXXXXOOOX |
| 3424 | | | mCmCmGmG*mG | | |
| WV- | UCUGCTCCAGCGGGAUACCG | 63 | mU*mCmUmGmC*T*C*C*A*G*C*G*G*G*A* | | XOOOXXXXXXXXXXXOOOX |
| 3425 | | | mUmAmCmC*mG | | |
| WV- | UCUGCACTGGGCTTCCUGGU | 64 | mU*mCmUmGmC*A*C*T*G*G*G*C*T*T*C* | | XOOOXXXXXXXXXXXOOOX |
| 3426 | | | mCmUmGmG*mU | | |
| WV- | GCGCUCTCTACCCTGCCUCA | 65 | mG*mCmGmCmU*C*T*C*T*A*C*C*C*T*G* | | XOOOXXXXXXXXXXXOOOX |
| 3427 | | | mCmCmUmC*mA | | |
| WV- | CUGCCTCAGTGTCTCGGCCA | 66 | mC*mUmGmCmC*T*C*A*G*T*G*T*C*T*C* | | XOOOXXXXXXXXXXXOOOX |
| 3428 | | | mGmGmCmC*mA | | |
| WV- | GACUCCTGGCCTTCCGCACA | 67 | mG*mAmCmUmC*C*T*G*G*C*C*T*T*C*C* | | XOOOXXXXXXXXXXXOOOX |
| 3429 | | | mGmCmAmC*mA | | |
| WV- | CGACCTCAGGATCCAUCCCU | 68 | mC*mGmAmCmC*T*C*A*G*G*A*T*C*C*A* | | XOOOXXXXXXXXXXXOOOX |
| 3430 | | | mUmCmCmC*mU | | |
| WV- | GGCUGGGATCCTCCACGUCA | 69 | mG*mGmCmUmG*G*G*A*T*C*C*T*C*C*A* | | XOOOXXXXXXXXXXXOOOX |
| 3431 | | | mCmGmUmC*mA | | |
| WV- | UCUGCTAGACTCGCCUCCUC | 70 | mU*mCmUmGmC*T*A*G*A*C*T*C*G*C*C* | | XOOOXXXXXXXXXXXOOOX |
| 3432 | | | mUmCmCmU*mC | | |
| WV- | AUCUUGTTACCCCCGCCAUG | 71 | mA*mUmCmUmU*G*T*T*A*C*C*C*C*C*G* | | XOOOXXXXXXXXXXXOOOX |
| 3433 | | | mCmCmAmU*mG | | |
| WV- | UGCACTGGGCTTCCTGGUGU | 72 | mU*mGmCmAmC*T*G*G*G*C*T*T*C*C*T* | | XOOOXXXXXXXXXXXOOOX |
| 3434 | | | mGmGmUmG*mU | | |
| WV- | UGCAGAGACCCTGTCGGAGG | 73 | mU*mGmCmAmG*A*G*A*C*C*C*T*G*T*C* | | XOOOXXXXXXXXXXXOOOX |
| 3435 | | | mGmGmAmG*mG | | |
| WV- | CCCAGCACCTTGAGAUCCGG | 74 | mC*mCmCmAmG*C*A*C*C*T*T*G*A*G*A* | | XOOOXXXXXXXXXXXOOOX |
| 3436 | | | mUmCmCmG*mG | | |
| WV- | CCUGUGAGGTCACCCACUGC | 75 | mC*mCmUmGmU*G*A*G*G*T*C*A*C*C*C* | | XOOOXXXXXXXXXXXOOOX |
| 3437 | | | mAmCmUmG*mC | | |
| WV- | CUGGGCATGGCGACCUCAGG | 76 | mC*mUmGmGmG*C*A*T*G*G*C*G*A*C*C* | | XOOOXXXXXXXXXXXOOOX |
| 3438 | | | mUmCmAmG*mG | | |
| WV- | CGAACTGCACCCCTTCCCAC | 77 | mC*mGmAmAmC*T*G*C*A*C*C*C*C*T*T* | | XOOOXXXXXXXXXXXOOOX |
| 3439 | | | mCmCmCmA*mC | | |
| WV- | AGCGAGCCTGGGCGAGAGGG | 78 | mA*mGmCmGmA*G*C*C*T*G*G*G*C*G*A* | | XOOOXXXXXXXXXXXOOOX |
| 3440 | | | mGmAmGmG*mG | | |
| WV- | GGGUGGCCTCTGCTTUGGUC | 79 | mG*mGmGmUmG*G*C*C*T*C*T*G*C*T*T* | | XOOOXXXXXXXXXXXOOOX |
| 3441 | | | mUmGmGmU*mC | | |
| WV- | UGCUCCAGCGGGATACCGGA | 80 | mU*mGmCmUmC*C*A*G*C*G*G*G*A*T*A* | | XOOOXXXXXXXXXXXOOOX |
| 3442 | | | mCmCmGmG*mA | | |
| WV- | AAGGGACCCTCTGCACUGGG | 81 | mA*mAmGmGmG*A*C*C*C*T*C*T*G*C*A* | | XOOOXXXXXXXXXXXOOOX |
| 3443 | | | mCmUmGmG*mG | | |
| WV- | CUGCUGTGCTTGGCTCCUGC | 82 | mC*mUmGmCmU*G*T*G*C*T*T*G*G*C*T* | | XOOOXXXXXXXXXXXOOOX |
| 3444 | | | mCmCmUmG*mC | | |
| WV- | GACGAACTGCACCCCUUCCC | 83 | mG*mAmCmGmA*A*C*T*G*C*A*C*C*C*C* | | XOOOXXXXXXXXXXXOOOX |
| 3445 | | | mUmUmCmC*mC | | |
| WV- | UGCUGTAGCGAGCCTGGGCG | 84 | mU*mGmCmUmG*T*A*G*C*G*A*G*C*C*T* | | XOOOXXXXXXXXXXXOOOX |
| 3446 | | | mGmGmGmC*mG | | |
| WV- | CACCCCTTCCCACAGCAUGG | 85 | mC*mAmCmCmC*C*T*T*C*C*C*A*C*A*G* | | XOOOXXXXXXXXXXXOOOX |
| 3447 | | | mCmAmUmG*mG | | |
| WV- | GACCCTCTGCACTGGGCUUC | 86 | mG*mAmCmCmC*T*C*T*G*C*A*C*T*G*G* | | XOOOXXXXXXXXXXXOOOX |
| 3448 | | | mGmCmUmU*mC | | |
| WV- | AGCUGGTGGACATTGGCCGG | 87 | mA*mGmCmUmG*G*T*G*G*A*C*A*T*T*G* | | XOOOXXXXXXXXXXXOOOX |
| 3449 | | | mGmCmCmG*mG | | |
| WV- | UCUCGGCCAGGGCATUCCCA | 88 | mU*mCmUmCmG*G*C*C*A*G*G*G*C*A*T* | | XOOOXXXXXXXXXXXOOOX |
| 3450 | | | mUmCmCmC*mA | | |
| WV- | GGUCUCTGCTGGACAGCCCU | 89 | mG*mGmUmCmU*C*T*G*C*T*G*G*A*C*A* | | XOOOXXXXXXXXXXXOOOX |
| 3451 | | | mGmCmCmC*mU | | |
| WV- | CGGCCAGGGCATTCCCAGCG | 90 | mC*mGmGmCmC*A*G*G*G*C*A*T*T*C*C* | | XOOOXXXXXXXXXXXOOOX |
| 3452 | | | mCmAmGmC*mG | | |
| WV- | UGGGATCCTCCACGTCACAG | 91 | mU*mGmGmGmA*T*C*C*T*C*C*A*C*G*T* | | XOOOXXXXXXXXXXXOOOX |
| 3453 | | | mCmAmCmA*mG | | |
| WV- | CCUGUTGGCTGCTCACUGGC | 92 | mC*mCmUmGmU*T*G*G*C*T*G*C*T*C*A* | | XOOOXXXXXXXXXXXOOOX |
| 3454 | | | mCmUmGmG*mC | | |
| WV- | GCCUGTTGGCTGCTCACUGG | 93 | mG*mCmCmUmG*T*T*G*G*C*T*G*C*T*C* | | XOOOXXXXXXXXXXXOOOX |
| 3455 | | | mAmCmUmG*mG | | |
| WV- | CCAGCACCTTGAGATCCGGG | 94 | mC*mCmAmGmC*A*C*C*T*T*G*A*G*A*T* | | XOOOXXXXXXXXXXXOOOX |
| 3456 | | | mCmCmGmG*mG | | |
| WV- | GGGAGGCCTGTTGGCUGCUC | 95 | mG*mGmGmAmG*G*C*C*T*G*T*T*G*G*C* | | XOOOXXXXXXXXXXXOOOX |
| 3457 | | | mUmGmCmU*mC | | |
| WV- | CUCAGAGGCTGGGATCCUCC | 96 | mC*mUmCmAmG*A*G*G*C*T*G*G*G*A*T* | | XOOOXXXXXXXXXXXOOOX |
| 3458 | | | mCmCmUmC*mC | | |
| WV- | GCCUCAGTGTCTCGGCCAGG | 97 | mG*mCmCmUmC*A*G*T*G*T*C*T*C*G*G* | | XOOOXXXXXXXXXXXOOOX |
| 3459 | | | mCmCmAmG*mG | | |
| WV- | CACAUGGGCCAGCCTACCCC | 98 | mC*mAmCmAmU*G*G*G*C*C*A*G*C*C*T* | | XOOOXXXXXXXXXXXOOOX |
| 3460 | | | mAmCmCmC*mC | | |
| WV- | GGUGGCCTCTGCTTTGGUCU | 99 | mG*mGmUmGmG*C*C*T*C*T*G*C*T*T*T* | | XOOOXXXXXXXXXXXOOOX |
| 3461 | | | mGmGmUmC*mU | | |
| WV- | ACGUUGTCACTCACTCCUCC | 100 | mA*mCmGmUmU*G*T*C*A*C*T*C*A*C*T* | | XOOOXXXXXXXXXXXOOOX |
| 3462 | | | mCmCmUmC*mC | | |
| WV- | UAGAAAGGCATGAAGCAGGA | 101 | mU*mAmGmAmA*A*G*G*C*A*T*G*A*A*G* | | XOOOXXXXXXXXXXXOOOX |
| 3858 | | | mCmAmGmG*mA | | |
| WV- | GUAGAAAGGCATGAAGCAGG | 102 | mG*mUmAmGmA*A*A*G*G*C*A*T*G*A*A* | | XOOOXXXXXXXXXXXOOOX |
| 3859 | | | mGmCmAmG*mG | | |
| WV- | UGUAGAAAGGCATGAAGCAG | 103 | mU*mGmUmAmG*A*A*A*G*G*C*A*T*G*A* | | XOOOXXXXXXXXXXXOOOX |
| 3860 | | | mAmGmCmA*mG | | |
| WV- | CUGUAGAAAGGCATGAAGCA | 104 | mC*mUmGmUmA*G*A*A*A*G*G*C*A*T*G* | | XOOOXXXXXXXXXXXOOOX |
| 3861 | | | mAmAmGmC*mA | | |
| WV- | ACUGUAGAAAGGCATGAAGC | 105 | mA*mCmUmGmU*A*G*A*A*A*G*G*C*A*T* | | XOOOXXXXXXXXXXXOOOX |
| 3862 | | | mGmAmAmG*mC | | |
| WV- | CACUGTAGAAAGGCAUGAAG | 106 | mC*mAmCmUmG*T*A*G*A*A*A*G*G*C*A* | | XOOOXXXXXXXXXXXOOOX |
| 3863 | | | mUmGmAmA*mG | | |
| WV- | CCACUGTAGAAAGGCAUGAA | 107 | mC*mCmAmCmU*G*T*A*G*A*A*A*G*G*C* | | XOOOXXXXXXXXXXXOOOX |
| 3864 | | | mAmUmGmA*mA | | |
| WV- | UAGAAAGGCA | 108 | mU*mAmGmAmA*A*G*G*C*A*T*G*A*A*G* | | XOOOXXXXXXXXXXXXXXX |
| 3865 | TGAAGCAGGAACAUA | | C*A*G*G*A*mAmCmAmU*mA | | XOOOX |
| WV- | GUAGAAAGGC | 109 | mG*mUmAmGmA*A*A*G*G*C*A*T*G*A*A* | | XOOOXXXXXXXXXXXXXXX |
| 3866 | ATGAAGCAGGAACAU | | G*C*A*G*G*mAmAmCmA*mU | | XOOOX |
| WV- | UGUAGAAAGG | 110 | mU*mGmUmAmG*A*A*A*G*G*C*A*T*G*A* | | XOOOXXXXXXXXXXXXXXX |
| 3867 | CATGAAGCAGGAACA | | A*G*C*A*G*mGmAmAmC*mA | | XOOOX |
| WV- | CUGUAGAAAG | 111 | mC*mUmGmUmA*G*A*A*A*G*G*C*A*T*G* | | XOOOXXXXXXXXXXXXXXX |
| 3868 | GCATGAAGCAGGAAC | | A*A*G*C*A*mGmGmAmA*mC | | XOOOX |
| WV- | ACUGUAGAAA | 112 | mA*mCmUmGmU*A*G*A*A*A*G*G*C*A*T* | | XOOOXXXXXXXXXXXXXXX |
| 3869 | GGCATGAAGCAGGAA | | G*A*A*G*C*mAmGmGmA*mA | | XOOOX |
| WV- | CACUGTAGAA | 113 | mC*mAmCmUmG*T*A*G*A*A*A*G*G*C*A* | | XOOOXXXXXXXXXXXXXXX |
| 3870 | AGGCATGAAGCAGGA | | T*G*A*A*G*mCmAmGmG*mA | | XOOOX |
| WV- | CCACUGTAGA | 114 | mC*mCmAmCmU*G*T*A*G*A*A*A*G*G*C* | | XOOOXXXXXXXXXXXXXXX |
| 3871 | AAGGCATGAAGCAGG | | A*T*G*A*A*mGmCmAmG*mG | | XOOOX |
| WV- | GCCACTGTAG | 115 | mG*mCmCmAmC*T*G*T*A*G*A*A*A*G*G* | | XOOOXXXXXXXXXXXXXXX |
| 3872 | AAAGGCATGAAGCAG | | C*A*T*G*A*mAmGmCmA*mG | | XOOOX |
| WV- | GGCCACTGTA | 116 | mG*mGmCmCmA*C*T*G*T*A*G*A*A*A*G* | | XOOOXXXXXXXXXXXXXXX |
| 3873 | GAAAGGCATGAAGCA | | G*C*A*T*G*mAmAmGmC*mA | | XOOOX |
| WV- | AGGCCACTGT | 117 | mA*mGmGmCmC*A*C*T*G*T*A*G*A*A*A* | | XOOOXXXXXXXXXXXXXXX |
| 3874 | AGAAAGGCATGAAGC | | G*G*C*A*T*mGmAmAmG*mC | | XOOOX |
| WV- | AAGGCCACTG | 118 | mA*mAmGmGmC*C*A*C*T*G*T*A*G*A*A* | | XOOOXXXXXXXXXXXXXXX |
| 3875 | TAGAAAGGCAUGAAG | | A*G*G*C*A*mUmGmAmA*mG | | XOOOX |
| WV- | UAAGGCCACT | 119 | mU*mAmAmGmG*C*C*A*C*T*G*T*A*G*A* | | XOOOXXXXXXXXXXXXXXXX |
| 3876 | GTAGAAAGGCAUGAA | | A*A*G*G*C*mAmUmGmA*mA | | OOOX |
| WV- | TCUGAGGAUGGACCGCGGGTU | 120 | T*fC*mUfG*mAfG*mGfA*mUfG*mGfA*mCfC*mG | | XXOXOXOXOXOXOXXXXXXX |
| 3986 | | | *fC*mG*fG*mG*T*mU | | |
| WV- | TCUGAGGAUGGACCGCGGGTU | 121 | T*fC*mUfG*mAfG*mGfA*mUfG*mGfA*mCfC* | | XXOXOXOXOXOXOXOOOOXX |
| 3987 | | | mGfCmGfGmG*T*mU | | |
| WV- | TCUGAGGAUGGACCGCGGGTU | 122 | POT*fC*mUfG*mAfG*mGfA*mUfG*mGfA*mCfC* | | XXOXOXOXOXOXOXXXXXXX |
| 3988 | | | mG*fC*mG*fG*mG*T*mU | | |
| WV- | TACCUGAGGAUGGACCGCGTU | 123 | T*fA*mCfC*mUfG*mAfG*mGfA*mUfG*mGfA*mC | | XXOXOXOXOXOXOXXXXXXX |
| 3989 | | | *fC*mG*fC*mG*T*mU | | |
| WV- | TACCUGAGGAUGGACCGCGTU | 124 | T*fA*mCfC*mUfG*mAfG*mGfA*mUfG*mGfA* | | XXOXOXOXOXOXOXOOOOXX |
| 3990 | | | mCfCmGfCmG*T*mU | | |
| WV- | TGACCUGAGGAUGGACCGCTU | 125 | T*fG*mAfC*mCfU*mGfA*mGfG*mAfU*mGfG*mA | | XXOXOXOXOXOXOXXXXXXX |
| 3991 | | | *fC*mC*fG*mC*T*mU | | |
| WV- | TGACCUGAGGAUGGACCGCTU | 126 | T*fG*mAfC*mCfU*mGfA*mGfG*mAfU*mGfG*mA | | XXOXOXOXOXOXOXXXXXXX |
| 3992 | | | *fC*mC*fG*mC*T*mU | | |
| WV- | TUUGUUACCCCCGCCAUGGTU | 127 | T*fU*mUfG*mUfU*mAfC*mCfC*mCfC*mGfC*mC | | XXOXOXOXOXOXOXXXXXXX |
| 3993 | | | *fA*mU*fG*mG*T*mU | | |
| WV- | TUUGUUACCCCCGCCAUGGTU | 128 | T*fU*mUfG*mUfU*mAfC*mCfC*mCfC*mGfC* | | XXOXOXOXOXOXOXOOOOXX |
| 3994 | | | mCfAmUfGmG*T*mU | | |
| WV- | TCCCCGCCAUGGAGACGUUTU | 129 | T*fC*mCfC*mCfG*mCfC*mAfU*mGfG*mAfG*mA | | XXOXOXOXOXOXOXXXXXXX |
| 3995 | | | *fC*mG*fU*mU*T*mU | | |
| WV- | TCCCCGCCAUGGAGACGUUTU | 130 | T*fC*mCfC*mCfG*mCfC*mAfU*mGfG*mAfG* | | XXOXOXOXOXOXOXOOOOXX |
| 3996 | | | mAfCmGfUmU*T*mU | | |
| WV- | TACCCCCGCCAUGGAGACGTU | 131 | T*fA*mCfC*mCfC*mCfG*mCfC*mAfU*mGfG*mA | | XXOXOXOXOXOXOXXXXXXX |
| 3997 | | | *fG*mA*fC*mG*T*mU | | |
| WV- | TACCCCCGCCAUGGAGACGTU | 132 | T*fA*mCfC*mCfC*mCfG*mCfC*mAfU*mGfG* | | XXOXOXOXOXOXOXOOOOXX |
| 3998 | | | mAfGmAfCmG*T*mU | | |
| WV- | TCCCCCGCCAUGGAGACGUTU | 133 | T*fC*mCfC*mCfC*mGfC*mCfA*mUfG*mGfA*mG | | XXOXOXOXOXOXOXXXXXXX |
| 3999 | | | *fA*mC*fG*mU*T*mU | | |
| WV- | TCCCCCGCCAUGGAGACGUTU | 134 | T*fC*mCfC*mCfC*mGfC*mCfA*mUfG*mGfA* | | XXOXOXOXOXOXOXOOOOXX |
| 4000 | | | mGfAmCfGmU*T*mU | | |
| WV- | TGCUCGGCCUCCAGUUCCATU | 135 | T*fG*mCfU*mCfG*mGfC*mCfU*mCfC*mAfG*mU | | XXOXOXOXOXOXOXXXXXXX |
| 4001 | | | *fU*mC*fC*mA*T*mU | | |
| WV- | TGCUCGGCCUCCAGUUCCATU | 136 | T*fG*mCfU*mCfG*mGfC*mCfU*mCfC*mAfG* | | XXOXOXOXOXOXOXOOOOXX |
| 4002 | | | mUfUmCfCmA*T*mU | | |
| WV- | TGGACCCUCUGCACUGGGCTU | 137 | T*fG*mGfA*mCfC*mCfU*mCfU*mGfC*mAfC*mU | | XXOXOXOXOXOXOXXXXXXX |
| 4003 | | | *fG*mG*fG*mC*T*mU | | |
| WV- | TGGACCCUCUGCACUGGGCTU | 138 | T*fG*mGfA*mCfC*mCfU*mCfU*mGfC*mAfC* | | XXOXOXOXOXOXOXOOOOXX |
| 4004 | | | mUfGmGfGmC*T*mU | | |
| WV- | TGACCCUCUGCACUGGGCUTU | 139 | T*fG*mAfC*mCfC*mUfC*mUfG*mCfA*mCfU*mG | | XXOXOXOXOXOXOXXXXXXX |
| 4005 | | | *fG*mG*fC*mU*T*mU | | |
| WV- | TGACCCUCUGCACUGGGCUTU | 140 | T*fG*mAfC*mCfC*mUfC*mUfG*mCfA*mCfU* | | XXOXOXOXOXOXOXOOOOXX |
| 4006 | | | mGfGmGfCmU*T*mU | | |
| WV- | TCAUGAAGCAGGAACAUACTU | 141 | T*fC*mAfU*mGfA*mAfG*mCfA*mGfG*mAfA*mC | | XXOXOXOXOXOXOXXXXXXX |
| 4018 | | | *fA*mU*fA*mC*T*mU | | |
| WV- | TGCAUGAAGCAGGAACAUATU | 142 | T*fG*mCfA*mUfG*mAfA*mGfC*mAfG*mGfA*mA | | XXOXOXOXOXOXOXXXXXXX |
| 4019 | | | *fC*mA*fU*mA*T*mU | | |
| WV- | TGGCAUGAAGCAGGAACAUTU | 143 | T*fG*mGfC*mAfU*mGfA*mAfG*mCfA*mGfG*mA | | XXOXOXOXOXOXOXXXXXXX |
| 4020 | | | *fA*mC*fA*mU*T*mU | | |
| WV- | TAGGCAUGAAGCAGGAACATU | 144 | T*fA*mGfG*mCfA*mUfG*mAfA*mGfC*mAfG*mG | | XXOXOXOXOXOXOXXXXXXX |
| 4021 | | | *fA*mA*fC*mA*T*mU | | |
| WV- | TAAGGCAUGAAGCAGGAACTU | 145 | T*fA*mAfG*mGfC*mAfU*mGfA*mAfG*mCfA*mG | | XXOXOXOXOXOXOXXXXXXX |
| 4022 | | | *fG*mA*fA*mC*T*mU | | |
| WV- | TAAAGGCAUGAAGCAGGAATU | 146 | T*fA*mAfA*mGfG*mCfA*mUfG*mAfA*mGfC*mA | | XXOXOXOXOXOXOXXXXXXX |
| 4023 | | | *fG*mG*fA*mA*T*mU | | |
| WV- | TGAAAGGCAUGAAGCAGGATU | 147 | T*fG*mAfA*mAfG*mGfC*mAfU*mGfA*mAfG*mC | | XXOXOXOXOXOXOXXXXXXX |
| 4024 | | | *fA*mG*fG*mA*T*mU | | |
| WV- | TAGAAAGGCAUGAAGCAGGTU | 148 | T*fA*mGfA*mAfA*mGfG*mCfA*mUfG*mAfA*mG | | XXOXOXOXOXOXOXXXXXXX |
| 4025 | | | *fC*mA*fG*mG*T*mU | | |
| WV- | TUAGAAAGGCAUGAAGCAGTU | 149 | T*fU*mAfG*mAfA*mAfG*mGfC*mAfU*mGfA*mA | | XXOXOXOXOXOXOXXXXXXX |
| 4026 | | | *fG*mC*fA*mG*T*mU | | |
| WV- | TGUAGAAAGGCAUGAAGCATU | 150 | T*fG*mUfA*mGfA*mAfA*mGfG*mCfA*mUfG*mA | | XXOXOXOXOXOXOXXXXXXX |
| 4027 | | | *fA*mG*fC*mA*T*mU | | |
| WV- | TUGUAGAAAGGCAUGAAGCTU | 151 | T*fU*mGfU*mAfG*mAfA*mAfG*mGfC*mAfU*mG | | XXOXOXOXOXOXOXXXXXXX |
| 4028 | | | *fA*mA*fG*mC*T*mU | | |
| WV- | TCUGUAGAAAGGCAUGAAGTU | 152 | T*fC*mUfG*mUfA*mGfA*mAfA*mGfG*mCfA*mU | | XXOXOXOXOXOXOXXXXXXX |
| 4029 | | | *fG*mA*fA*mG*T*mU | | |
| WV- | TACUGUAGAAAGGCAUGAATU | 153 | T*fA*mCfU*mGfU*mAfG*mAfA*mAfG*mGfC*mA | | XXOXOXOXOXOXOXXXXXXX |
| 4030 | | | *fU*mG*fA*mA*T*mU | | |
| WV- | TCACUGUAGAAAGGCAUGATU | 154 | T*fC*mAfC*mUfG*mUfA*mGfA*mAfA*mGfG*mC | | XXOXOXOXOXOXOXXXXXXX |
| 4031 | | | *fA*mU*fG*mA*T*mU | | |
| WV- | TCCACUGUAGAAAGGCAUGTU | 155 | T*fC*mCfA*mCfU*mGfU*mAfG*mAfA*mAfG*mG | | XXOXOXOXOXOXOXXXXXXX |
| 4032 | | | *fC*mA*fU*mG*T*mU | | |
| WV- | TGCCACUGUAGAAAGGCAUTU | 156 | T*fG*mCfC*mAfC*mUfG*mUfA*mGfA*mAfA*mG | | XXOXOXOXOXOXOXXXXXXX |
| 4033 | | | *fG*mC*fA*mU*T*mU | | |
| WV- | TGGCCACUGUAGAAAGGCATU | 157 | T*fG*mGfC*mCfA*mCfU*mGfU*mAfG*mAfA*mA | | XXOXOXOXOXOXOXXXXXXX |
| 4034 | | | *fG*mG*fC*mA*T*mU | | |
| WV- | TAGGCCACUGUAGAAAGGCTU | 158 | T*fA*mGfG*mCfC*mAfC*mUfG*mUfA*mGfA*mA | | XXOXOXOXOXOXOXXXXXXX |
| 4035 | | | *fA*mG*fG*mC*T*mU | | |
| WV- | TAAGGCCACUGUAGAAAGGTU | 159 | T*fA*mAfG*mGfC*mCfA*mCfU*mGfU*mAfG*mA | | XXOXOXOXOXOXOXXXXXXX |
| 4036 | | | *fA*mA*fG*mG*T*mU | | |
| WV- | TUAAGGCCACUGUAGAAAGTU | 160 | T*fU*mAfA*mGfG*mCfC*mAfC*mUfG*mUfA*mG | | XXOXOXOXOXOXOXXXXXXX |
| 4037 | | | *fA*mA*fA*mG*T*mU | | |
| WV- | TAUAAGGCCACUGUAGAAATU | 161 | T*fA*mUfA*mAfG*mGfC*mCfA*mCfU*mGfU*mA | | XXOXOXOXOXOXOXXXXXXX |
| 4038 | | | *fG*mA*fA*mA*T*mU | | |
| WV- | TCAUGAAGCAGGAACAUACTU | 162 | T*fC*mAfU*mGfA*mAfG*mCfA*mGfG*mAfA* | | XXOXOXOXOXOXOXOOOOXX |
| 4039 | | | mCfAmUfAmC*T*mU | | |
| WV- | TGCAUGAAGCAGGAACAUATU | 163 | T*fG*mCfA*mUfG*mAfA*mGfC*mAfG*mGfA* | | XXOXOXOXOXOXOXOOOOXX |
| 4040 | | | mAfCmAfUmA*T*mU | | |
| WV- | TGGCAUGAAGCAGGAACAUTU | 164 | T*fG*mGfC*mAfU*mGfA*mAfG*mCfA*mGfG* | | XXOXOXOXOXOXOXOOOOXX |
| 4041 | | | mAfAmCfAmU*T*mU | | |
| WV- | TAGGCAUGAAGCAGGAACATU | 165 | T*fA*mGfG*mCfA*mUfG*mAfA*mGfC*mAfG* | | XXOXOXOXOXOXOXOOOOXX |
| 4042 | | | mGfAmAfCmA*T*mU | | |
| WV- | TAAGGCAUGAAGCAGGAACTU | 166 | T*fA*mAfG*mGfC*mAfU*mGfA*mAfG*mCfA* | | XXOXOXOXOXOXOXOOOOXX |
| 4043 | | | mGfGmAfAmC*T*mU | | |
| WV- | TAAAGGCAUGAAGCAGGAATU | 167 | T*fA*mAfA*mGfG*mCfA*mUfG*mAfA*mGfC* | | XXOXOXOXOXOXOXOOOOXX |
| 4044 | | | mAfGmGfAmA*T*mU | | |
| WV- | TGAAAGGCAUGAAGCAGGATU | 168 | T*fG*mAfA*mAfG*mGfC*mAfU*mGfA*mAfG* | | XXOXOXOXOXOXOXOOOOXX |
| 4045 | | | mCfAmGfGmA*T*mU | | |
| WV- | TAGAAAGGCAUGAAGCAGGTU | 169 | T*fA*mGfA*mAfA*mGfG*mCfA*mUfG*mAfA* | | XXOXOXOXOXOXOXOOOOXX |
| 4046 | | | mGfCmAfGmG*T*mU | | |
| WV- | TUAGAAAGGCAUGAAGCAGTU | 170 | T*fU*mAfG*mAfA*mAfG*mGfC*mAfU*mGfA* | | XXOXOXOXOXOXOXOOOOXX |
| 4047 | | | mAfGmCfAmG*T*mU | | |
| WV- | TGUAGAAAGGCAUGAAGCATU | 171 | T*fG*mUfA*mGfA*mAfA*mGfG*mCfA*mUfG* | | XXOXOXOXOXOXOXOOOOXX |
| 4048 | | | mAfAmGfCmA*T*mU | | |
| WV- | TUGUAGAAAGGCAUGAAGCTU | 172 | T*fU*mGfU*mAfG*mAfA*mAfG*mGfC*mAfU* | | XXOXOXOXOXOXOXOOOOXX |
| 4049 | | | mGfAmAfGmC*T*mU | | |
| WV- | TCUGUAGAAAGGCAUGAAGTU | 173 | T*fC*mUfG*mUfA*mGfA*mAfA*mGfG*mCfA* | | XXOXOXOXOXOXOXOOOOXX |
| 4050 | | | mUfGmAfAmG*T*mU | | |
| WV- | TACUGUAGAAAGGCAUGAATU | 174 | T*fA*mCfU*mGfU*mAfG*mAfA*mAfG*mGfC* | | XXOXOXOXOXOXOXOOOOXX |
| 4051 | | | mAfUmGfAmA*T*mU | | |
| WV- | TCACUGUAGAAAGGCAUGATU | 175 | T*fC*mAfC*mUfG*mUfA*mGfA*mAfA*mGfG* | | XXOXOXOXOXOXOXOOOOXX |
| 4052 | | | mCfAmUfGmA*T*mU | | |
| WV- | TCCACUGUAGAAAGGCAUGTU | 176 | T*fC*mCfA*mCfU*mGfU*mAfG*mAfA*mAfG* | | XXOXOXOXOXOXOXOOOOXX |
| 4053 | | | mGfCmAfUmG*T*mU | | |
| WV- | TGCCACUGUAGAAAGGCAUTU | 177 | T*fG*mCfC*mAfC*mUfG*mUfA*mGfA*mAfA* | | XXOXOXOXOXOXOXOOOOXX |
| 4054 | | | mGfGmCfAmU*T*mU | | |
| WV- | TGGCCACUGUAGAAAGGCATU | 178 | T*fG*mGfC*mCfA*mCfU*mGfU*mAfG*mAfA* | | XXOXOXOXOXOXOXOOOOXX |
| 4055 | | | mAfGmGfCmA*T*mU | | |
| WV- | TAGGCCACUGUAGAAAGGCTU | 179 | T*fA*mGfG*mCfC*mAfC*mUfG*mUfA*mGfA* | | XXOXOXOXOXOXOXOOOOXX |
| 4056 | | | mAfAmGfGmC*T*mU | | |
| WV- | TAAGGCCACUGUAGAAAGGTU | 180 | T*fA*mAfG*mGfC*mCfA*mCfU*mGfU*mAfG* | | XXOXOXOXOXOXOXOOOOXX |
| 4057 | | | mAfAmAfGmG*T*mU | | |
| WV- | TUAAGGCCACUGUAGAAAGTU | 181 | T*fU*mAfA*mGfG*mCfC*mAfC*mUfG*mUfA* | | XXOXOXOXOXOXOXOOOOXX |
| 4058 | | | mGfAmAfAmG*T*mU | | |
| WV- | TAUAAGGCCACUGUAGAAATU | 182 | T*fA*mUfA*mAfG*mGfC*mCfA*mCfU*mGfU* | | XXOXOXOXOXOXOXOOOOXX |
| 4059 | | | mAfGmAfAmA*T*mU | | |
| WV- | TCAUGAAGCAGGAACAUACCATU | 183 | T*fC*mAfU*mGfA*mAfG*mCfA*mGfG*mAfA*mC | | XXOXOXOXOXOXOXXXXXXX |
| 4060 | | | *fA*mU*fA*mC*fC*mA*T*mU | | XX |
| WV- | TGCAUGAAGCAGGAACAUACCT | 184 | T*fG*mCfA*mUfG*mAfA*mGfC*mAfG*mGfA*mA | | XXOXOXOXOXOXOXXXXXXX |
| 4061 | U | | *fC*mA*fU*mA*fC*mC*T*mU | | XX |
| WV- | TGGCAUGAAGCAGGAACAUACT | 185 | T*fG*mGfC*mAfU*mGfA*mAfG*mCfA*mGfG*mA | | XXOXOXOXOXOXOXXXXXXX |
| 4062 | U | | *fA*mC*fA*mU*fA*mC*T*mU | | XX |
| WV- | TAGGCAUGAAGCAGGAACAUAT | 186 | T*fA*mGfG*mCfA*mUfG*mAfA*mGfC*mAfG*mG | | XXOXOXOXOXOXOXXXXXXX |
| 4063 | U | | *fA*mA*fC*mA*fU*mA*T*mU | | XX |
| WV- | TAAGGCAUGAAGCAGGAACAUT | 187 | T*fA*mAfG*mGfC*mAfU*mGfA*mAfG*mCfA*mG | | XXOXOXOXOXOXOXXXXXXX |
| 4064 | U | | *fG*mA*fA*mC*fA*mU*T*mU | | XX |
| WV- | TAAAGGCAUGAAGCAGGAACAT | 188 | T*fA*mAfA*mGfG*mCfA*mUfG*mAfA*mGfC*mA | | XXOXOXOXOXOXOXXXXXXX |
| 4065 | U | | *fG*mG*fA*mA*fC*mA*T*mU | | XX |
| WV- | TGAAAGGCAUGAAGCAGGAACT | 189 | T*fG*mAfA*mAfG*mGfC*mAfU*mGfA*mAfG*mC | | XXOXOXOXOXOXOXXXXXXX |
| 4066 | U | | *fA*mG*fG*mA*fA*mC*T*mU | | XX |
| WV- | TAGAAAGGCAUGAAGCAGGAAT | 190 | T*fA*mGfA*mAfA*mGfG*mCfA*mUfG*mAfA*mG | | XXOXOXOXOXOXOXXXXXXX |
| 4067 | U | | *fC*mA*fG*mG*fA*mA*T*mU | | XX |
| WV- | TUAGAAAGGCAUGAAGCAGGAT | 191 | T*fU*mAfG*mAfA*mAfG*mGfC*mAfU*mGfA*mA | | XXOXOXOXOXOXOXXXXXXX |
| 4068 | U | | *fG*mC*fA*mG*fG*mA*T*mU | | XX |
| WV- | TGUAGAAAGGCAUGAAGCAGGT | 192 | T*fG*mUfA*mGfA*mAfA*mGfG*mCfA*mUfG*mA | | XXOXOXOXOXOXOXXXXXXX |
| 4069 | U | | *fA*mG*fC*mA*fG*mG*T*mU | | XX |
| WV- | TUGUAGAAAGGCAUGAAGCAGT | 193 | T*fU*mGfU*mAfG*mAfA*mAfG*mGfC*mAfU*mG | | XXOXOXOXOXOXOXXXXXXX |
| 4070 | U | | *fA*mA*fG*mC*fA*mG*T*mU | | XX |
| WV- | TCUGUAGAAAGGCAUGAAGCAT | 194 | T*fC*mUfG*mUfA*mGfA*mAfA*mGfG*mCfA*mU | | XXOXOXOXOXOXOXXXXXXX |
| 4071 | U | | *fG*mA*fA*mG*fC*mA*T*mU | | XX |
| WV- | TACUGUAGAAAGGCAUGAAGCT | 195 | T*fA*mCfU*mGfU*mAfG*mAfA*mAfG*mGfC*mA | | XXOXOXOXOXOXOXXXXXXX |
| 4072 | U | | *fU*mG*fA*mA*fG*mC*T*mU | | XX |
| WV- | TCACUGUAGAAAGGCAUGAAGT | 196 | T*fC*mAfC*mUfG*mUfA*mGfA*mAfA*mGfG*mC | | XXOXOXOXOXOXOXXXXXXX |
| 4073 | U | | *fA*mU*fG*mA*fA*mG*T*mU | | XX |
| WV- | TCCACUGUAGAAAGGCAUGAAT | 197 | T*fC*mCfA*mCfU*mGfU*mAfG*mAfA*mAfG*mG | | XXOXOXOXOXOXOXXXXXXX |
| 4074 | U | | *fC*mA*fU*mG*fA*mA*T*mU | | XX |
| WV- | TGCCACUGUAGAAAGGCAUGAT | 198 | T*fG*mCfC*mAfC*mUfG*mUfA*mGfA*mAfA*mG | | XXOXOXOXOXOXOXXXXXXX |
| 4075 | U | | *fG*mC*fA*mU*fG*mA*T*mU | | XX |
| WV- | TGGCCACUGUAGAAAGGCAUGT | 199 | T*fG*mGfC*mCfA*mCfU*mGfU*mAfG*mAfA*mA | | XXOXOXOXOXOXOXXXXXXXXX |
| 4076 | U | | *fG*mG*fC*mA*fU*mG*T*mU | | |
| WV- | TAGGCCACUGUAGAAAGGCAUT | 200 | T*fA*mGfG*mCfC*mAfC*mUfG*mUfA*mGfA*mA | | XXOXOXOXOXOXOXXXXXXXXX |
| 4077 | U | | *fA*mG*fG*mC*fA*mU*T*mU | | |
| WV- | TAAGGCCACUGUAGAAAGGCAT | 201 | T*fA*mAfG*mGfC*mCfA*mCfU*mGfU*mAfG*mA | | XXOXOXOXOXOXOXXXXXXXXX |
| 4078 | U | | *fA*mA*fG*mG*fC*mA*T*mU | | |
| WV- | TUAAGGCCACUGUAGAAAGGCT | 202 | T*fU*mAfA*mGfG*mCfC*mAfC*mUfG*mUfA*mG | | XXOXOXOXOXOXOXXXXXXXXX |
| 4079 | U | | *fA*mA*fA*mG*fG*mC*T*mU | | |
| WV- | TAUAAGGCCACUGUAGAAAGGT | 203 | T*fA*mUfA*mAfG*mGfC*mCfA*mCfU*mGfU*mA | | XXOXOXOXOXOXOXXXXXXXXX |
| 4080 | U | | *fG*mA*fA*mA*fG*mG*T*mU | | |
| WV- | TGAUAAGGCCACUGUAGAAAGT | 204 | T*fG*mAfU*mAfA*mGfG*mCfC*mAfC*mUfG*mU | | XXOXOXOXOXOXOXXXXXXXXX |
| 4081 | U | | *fA*mG*fA*mA*fA*mG*T*mU | | |
| WV- | TGGAUAAGGCCACUGUAGAAAT | 205 | T*fG*mGfA*mUfA*mAfG*mGfC*mCfA*mCfU*mG | | XXOXOXOXOXOXOXXXXXXXXX |
| 4082 | U | | *fU*mA*fG*mA*fA*mA*T*mU | | |
| WV- | TCAUGAAGCAGGAACAUACCATU | 206 | T*fC*mAfU*mGfA*mAfG*mCfA*mGfG*mAfA* | | XXOXOXOXOXOXOXOOOOOOX |
| 4083 | | | mCfAmUfAmCfCmA*T*mU | | X |
| WV- | TGCAUGAAGCAGGAACAUACCT | 207 | T*fG*mCfA*mUfG*mAfA*mGfC*mAfG*mGfA* | | XXOXOXOXOXOXOXOOOOOOX |
| 4084 | U | | mAfCmAfUmAfCmC*T*mU | | X |
| WV- | TGGCAUGAAGCAGGAACAUACT | 208 | T*fG*mGfC*mAfU*mGfA*mAfG*mCfA*mGfG* | | XXOXOXOXOXOXOXOOOOOOX |
| 4085 | U | | mAfAmCfAmUfAmC*T*mU | | X |
| WV- | TAGGCAUGAAGCAGGAACAUAT | 209 | T*fA*mGfG*mCfA*mUfG*mAfA*mGfC*mAfG* | | XXOXOXOXOXOXOXOOOOOOX |
| 4086 | U | | mGfAmAfCmAfUmA*T*mU | | X |
| WV- | TAAGGCAUGAAGCAGGAACAUT | 210 | T*fA*mAfG*mGfC*mAfU*mGfA*mAfG*mCfA* | | XXOXOXOXOXOXOXOOOOOOX |
| 4087 | U | | mGfGmAfAmCfAmU*T*mU | | X |
| WV- | TAAAGGCAUGAAGCAGGAACAT | 211 | T*fA*mAfA*mGfG*mCfA*mUfG*mAfA*mGfC* | | XXOXOXOXOXOXOXOOOOOOX |
| 4088 | U | | mAfGmGfAmAfCmA*T*mU | | X |
| WV- | TGAAAGGCAUGAAGCAGGAACT | 212 | T*fG*mAfA*mAfG*mGfC*mAfU*mGfA*mAfG* | | XXOXOXOXOXOXOXOOOOOOX |
| 4089 | U | | mCfAmGfGmAfAmC*T*mU | | X |
| WV- | TAGAAAGGCAUGAAGCAGGAAT | 213 | T*fA*mGfA*mAfA*mGfG*mCfA*mUfG*mAfA* | | XXOXOXOXOXOXOXOOOOOOX |
| 4090 | U | | mGfCmAfGmGfAmA*T*mU | | X |
| WV- | TUAGAAAGGCAUGAAGCAGGAT | 214 | T*fU*mAfG*mAfA*mAfG*mGfC*mAfU*mGfA* | | XXOXOXOXOXOXOXOOOOOOX |
| 4091 | U | | mAfGmCfAmGfGmA*T*mU | | X |
| WV- | TGUAGAAAGGCAUGAAGCAGGT | 215 | T*fG*mUfA*mGfA*mAfA*mGfG*mCfA*mUfG* | | XXOXOXOXOXOXOXOOOOOOX |
| 4092 | U | | mAfAmGfCmAfGmG*T*mU | | X |
| WV- | TUGUAGAAAGGCAUGAAGCAGT | 216 | T*fU*mGfU*mAfG*mAfA*mAfG*mGfC*mAfU* | | XXOXOXOXOXOXOXOOOOOOX |
| 4093 | U | | mGfAmAfGmCfAmG*T*mU | | X |
| WV- | TCUGUAGAAAGGCAUGAAGCAT | 217 | T*fC*mUfG*mUfA*mGfA*mAfA*mGfG*mCfA* | | XXOXOXOXOXOXOXOOOOOOX |
| 4094 | U | | mUfGmAfAmGfCmA*T*mU | | X |
| WV- | TACUGUAGAAAGGCAUGAAGCT | 218 | T*fA*mCfU*mGfU*mAfG*mAfA*mAfG*mGfC* | | XXOXOXOXOXOXOXOOOOOOX |
| 4095 | U | | mAfUmGfAmAfGmC*T*mU | | X |
| WV- | TCACUGUAGAAAGGCAUGAAGT | 219 | T*fC*mAfC*mUfG*mUfA*mGfA*mAfA*mGfG* | | XXOXOXOXOXOXOXOOOOOOX |
| 4096 | U | | mCfAmUfGmAfAmG*T*mU | | X |
| WV- | TCCACUGUAGAAAGGCAUGAAT | 220 | T*fC*mCfA*mCfU*mGfU*mAfG*mAfA*mAfG* | | XXOXOXOXOXOXOXOOOOOOX |
| 4097 | U | | mGfCmAfUmGfAmA*T*mU | | X |
| WV- | TGCCACUGUAGAAAGGCAUGAT | 221 | T*fG*mCfC*mAfC*mUfG*mUfA*mGfA*mAfA* | | XXOXOXOXOXOXOXOOOOOOX |
| 4098 | U | | mGfGmCfAmUfGmA*T*mU | | X |
| WV- | TGGCCACUGUAGAAAGGCAUGT | 222 | T*fG*mGfC*mCfA*mCfU*mGfU*mAfG*mAfA* | | XXOXOXOXOXOXOXOOOOOOX |
| 4099 | U | | mAfGmGfCmAfUmG*T*mU | | X |
| WV- | TAGGCCACUGUAGAAAGGCAUT | 223 | T*fA*mGfG*mCfC*mAfC*mUfG*mUfA*mGfA* | | XXOXOXOXOXOXOXOOOOOOX |
| 4100 | U | | mAfAmGfGmCfAmU*T*mU | | X |
| WV- | TAAGGCCACUGUAGAAAGGCAT | 224 | T*fA*mAfG*mGfC*mCfA*mCfU*mGfU*mAfG* | | XXOXOXOXOXOXOXOOOOOOX |
| 4101 | U | | mAfAmAfGmGfCmA*T*mU | | X |
| WV- | TUAAGGCCACUGUAGAAAGGCT | 225 | T*fU*mAfA*mGfG*mCfC*mAfC*mUfG*mUfA* | | XXOXOXOXOXOXOXOOOOOOX |
| 4102 | U | | mGfAmAfAmGfGmC*T*mU | | X |
| WV- | TAUAAGGCCACUGUAGAAAGGT | 226 | T*fA*mUfA*mAfG*mGfC*mCfA*mCfU*mGfU* | | XXOXOXOXOXOXOXOOOOOOX |
| 4103 | U | | mAfGmAfAmAfGmG*T*mU | | X |
| WV- | TGAUAAGGCCACUGUAGAAAGT | 227 | T*fG*mAfU*mAfA*mGfG*mCfC*mAfC*mUfG* | | XXOXOXOXOXOXOXOOOOOOX |
| 4104 | U | | mUfAmGfAmAfAmG*T*mU | | X |
| WV- | TGGAUAAGGCCACUGUAGAAAT | 228 | T*fG*mGfA*mUfA*mAfG*mGfC*mCfA*mCfU* | | XXOXOXOXOXOXOXOOOOOOX |
| 4105 | U | | mGfUmAfGmAfAmA*T*mU | | X |
| WV- | TGCCACUGUAGAAAGGCAUGAT | 229 | T*fG*mCfC*mAfC*mUfG*mUfA*mGfA* | | XXOXOXOXOXOXOOOOOOOOX |
| 5305 | U | | mAfAmGfGmCfAmUfGmA*T*mU | | X |
| WV- | TGCCACUGUAGAAAGGCAUGAT | 230 | T*fG*mCfC*mAfC*mUfG*mUfA* | | XXOXOXOXOXOOOOOOOOOOX |
| 5306 | U | | mGfAmAfAmGfGmCfAmUfGmA*T*mU | | X |
| WV- | TGCCACUGUAGAAAGGCAUGAT | 231 | T*fG*mCfC*mAfC*mUfG* | | XXOXOXOXOOOOOOOOOOOO |
| 5307 | U | | mUfAmGfAmAfAmGfGmCfAmUfGmA*T*mU | | XX |
| WV- | TGCCACUGUAGAAAGGCAUGAT | 232 | T*fG*mCfC*mAfC* | | XXOXOXOOOOOOOOOOOOOO |
| 5308 | U | | mUfGmUfAmGfAmAfAmGfGmCfAmUfGmA*T*mU | | XX |
| WV- | TGCCACUGUAGAAAGGCAUGAT | 233 | T*fG*mCfC*mAfCmUfGmUfAmGfAmAfAmGfGmCfA | | XXOXOOOOOOOOOOOOOOOO |
| 5309 | U | | mUfGmA*T*mU | | XX |
| WV- | TGCCACUGUAGAAAGGCAUGAT | 234 | T*fG*mCfCmAfCmUfGmUfAmGfAmAfAmGfGmC | | XXOOOOOOOOOOOOOOOOO |
| 5310 | U | | fAmUfGmA*T*mU | | OXX |
| WV- | TGCCACUGUAGAAAGGCAUGAT | 235 | T*fG*mCC*mAC*mUG*mUfA*mGfA*mAfA* | | XXOXOXOXOXOXOXOOOOOOX |
| 5311 | U | | mGfGmCfAmUfGmA*T*mU | | X |
| WV- | TGCCACUGUAGAAAGGCAUGAT | 236 | T*fG*mCC*mAfC*mUfG*mUfA*mGfA*mAfA* | | XXOXOXOXOXOXOXOOOOOOX |
| 5312 | U | | mGfGmCfAmUfGmA*T*mU | | X |
| WV- | TGCCACUGUAGAAAGGCAUGAT | 237 | T*fG*mCfC*mAC*mUfG*mUfA*mGfA*mAfA* | | XXOXOXOXOXOXOXOOOOOOX |
| 5313 | U | | mGfGmCfAmUfGmA*T*mU | | X |
| WV- | TGCCACUGUAGAAAGGCAUGAT | 238 | T*fG*mCfC*mAfC*mUG*mUfA*mGfA*mAfA* | | XXOXOXOXOXOXOXOOOOOOX |
| 5314 | U | | mGfGmCfAmUfGmA*T*mU | | X |
| WV- | TGCCACUGUAGAAAGGCAUTU | 239 | T*fG*mCfC*mAfC*mUfG*mUfA*mGfA* | | XXOXOXOXOXOXOOOOOOXX |
| 5315 | | | mAfAmGfGmCfAmU*T*mU | | |
| WV- | TGCCACUGUAGAAAGGCAUTU | 240 | T*fG*mCfC*mAfC*mUfG*mUfA* | | XXOXOXOXOXOOOOOOOOXX |
| 5316 | | | mGfAmAfAmGfGmCfAmU*T*mU | | |
| WV- | TGCCACUGUAGAAAGGCAUTU | 241 | T*fG*mCfC*mAfC*mUfG* | | XXOXOXOXOOOOOOOOOOXX |
| 5317 | | | mUfAmGfAmAfAmGfGmCfAmU*T*mU | | |
| WV- | TGCCACUGUAGAAAGGCAUTU | 242 | T*fG*mCfC*mAfC*mUfGmUfAmGfA | | XXOXOXOOOOOOOOOOOOXX |
| 5318 | | | mAfAmGfGmCfAmU*T*mU | | |
| WV- | TGCCACUGUAGAAAGGCAUTU | 243 | T*fG*mCfC*mAfCmUfGmUfAmGfA | | XXOXOOOOOOOOOOOOOOXX |
| 5319 | | | mAfAmGfGmCfAmU*T*mU | | |
| WV- | TGCCACUGUAGAAAGGCAUTU | 244 | T*fG*mCfCmAfCmUfGmUfAmGfAmAfAmGfGmCfAmU* | | XXOOOOOOOOOOOOOOOOXX |
| 5320 | | | T*mU | | |
| WV- | TGCCACUGUAGAAAGGCAUTU | 245 | T*fG*mCC*mAC*mUG*mUfA*mGfA*mAfA* | | XXOXOXOXOXOXOXOOOOXX |
| 5321 | | | mGfGmCfAmU*T*mU | | |
| WV- | TGCCACUGUAGAAAGGCAUTU | 246 | T*fG*mCC*mAfC*mUfG*mUfA*mGfA*mAfA* | | XXOXOXOXOXOXOXOOOOXX |
| 5322 | | | mGfGmCfAmU*T*mU | | |
| WV- | TGCCACUGUAGAAAGGCAUTU | 247 | T*fG*mCfC*mAC*mUfG*mUfA*mGfA*mAfA* | | XXOXOXOXOXOXOXOOOOXX |
| 5323 | | | mGfGmCfAmU*T*mU | | |
| WV- | TGCCACUGUAGAAAGGCAUTU | 248 | T*fG*mCfC*mAfC*mUG*mUfA*mGfA*mAfA* | | XXOXOXOXOXOXOXOOOOXX |
| 5324 | | | mGfGmCfAmU*T*mU | | |
| WV- | TAGGCAUGAAGCAGGAACATU | 249 | T*fA*mGfG*mCfA*mUfG*mAfA*mGfC* | | XXOXOXOXOXOXOOOOOOXX |
| 5325 | | | mAfGmGfAmAfCmA*T*mU | | |
| WV- | TAGGCAUGAAGCAGGAACAUAT | 250 | T*fA*mGfG*mCfA*mUfG*mAfA*mGfC* | | XXOXOXOXOXOXOOOOOOOOX |
| 5326 | U | | mAfGmGfAmAfCmAfUmA*T*mU | | X |
| WV- | TCCUGAGGAUGGACCGCGGGGT | 251 | T*fC*mCfU*mGfA*mGfG*mAfU*mGfG*mAfC*mC | | XXOXOXOXOXOXOXXXXXXXXX |
| 6153 | U | | *fG*mC*fG*mG*fG*mG*T*mU | | |
| WV- | TGUGCUUGGCUCCUGCCUGGGT | 252 | T*fG*mUfG*mCfU*mUfG*mGfC*mUfC*mCfU*mG | | XXOXOXOXOXOXOXXXXXXXXX |
| 6154 | U | | *fC*mC*fU*mG*fG*mG*T*mU | | |
| WV- | TCUUGUUACCCCCGCCAUGGAT | 253 | T*fC*mUfU*mGfU*mUfA*mCfC*mCfC*mCfG*mC | | XXOXOXOXOXOXOXXXXXXXXX |
| 6155 | U | | *fC*mA*fU*mG*fG*mA*T*mU | | |
| WV- | TUACCCCCGCCAUGGAGACGUTU | 254 | T*fU*mAfC*mCfC*mCfC*mGfC*mCfA*mUfG*mG | | XXOXOXOXOXOXOXXXXXXXXX |
| 6156 | | | *fA*mG*fA*mC*fG*mU*T*mU | | |
| WV- | TCCCCCGCCAUGGAGACGUUUT | 255 | T*fC*mCfC*mCfC*mGfC*mCfA*mUfG*mGfA*mG | | XXOXOXOXOXOXOXXXXXXXXX |
| 6157 | U | | *fA*mC*fG*mU*fU*mU*T*mU | | |
| WV- | TACCUGAGGAUGGACCGCGGGT | 256 | T*fA*mCfC*mUfG*mAfG*mGfA*mUfG*mGfA*mC | | XXOXOXOXOXOXOXXXXXXXXX |
| 6158 | U | | *fC*mG*fC*mG*fG*mG*T*mU | | |
| WV- | TGACCUGAGGAUGGACCGCGGT | 257 | T*fG*mAfC*mCfU*mGfA*mGfG*mAfU*mGfG*mA | | XXOXOXOXOXOXOXXXXXXXXX |
| 6159 | U | | *fC*mC*fG*mC*fG*mG*T*mU | | |
| WV- | TACCCCCGCCAUGGAGACGUUTU | 258 | T*fA*mCfC*mCfC*mCfG*mCfC*mAfU*mGfG*mA | | XXOXOXOXOXOXOXXXXXXXXX |
| 6160 | | | *fG*mA*fC*mG*fU*mU*T*mU | | |
| WV- | TGGACCCUCUGCACUGGGCUUT | 259 | T*fG*mGfA*mCfC*mCfU*mCfU*mGfC*mAfC*mU | | XXOXOXOXOXOXOXXXXXXXXX |
| 6161 | U | | *fG*mG*fG*mC*fU*mU*T*mU | | |
| WV- | TCUGCUGGACAGCCCUUGGGGT | 260 | T*fC*mUfG*mCfU*mGfG*mAfC*mAfG*mCfC*mC | | XXOXOXOXOXOXOXXXXXXXXX |
| 6162 | U | | *fU*mU*fG*mG*fG*mG*T*mU | | |
| WV- | TUGCACUGGGCUUCCUGGUGUT | 261 | T*fU*mGfC*mAfC*mUfG*mGfG*mCfU*mUfC*mC | | XXOXOXOXOXOXOXXXXXXXXX |
| 6163 | U | | *fU*mG*fG*mU*fG*mU*T*mU | | |
| WV- | TGGACCUGAGGAUGGACCGCGT | 262 | T*fG*mGfA*mCfC*mUfG*mAfG*mGfA*mUfG*mG | | XXOXOXOXOXOXOXXXXXXXXX |
| 6164 | U | | *fA*mC*fC*mG*fC*mG*T*mU | | |
| WV- | TGGGACCCUCUGCACUGGGCUT | 263 | T*fG*mGfG*mAfC*mCfC*mUfC*mUfG*mCfA*mC | | XXOXOXOXOXOXOXXXXXXXXX |
| 6165 | U | | *fU*mG*fG*mG*fC*mU*T*mU | | |
| WV- | TUUGUUACCCCCGCCAUGGAGT | 264 | T*fU*mUfG*mUfU*mAfC*mCfC*mCfC*mGfC*mC | | XXOXOXOXOXOXOXXXXXXXXX |
| 6166 | U | | *fA*mU*fG*mG*fA*mG*T*mU | | |
| WV- | TCCUGUGAGGUCACCCACUGCT | 265 | T*fC*mCfU*mGfU*mGfA*mGfG*mUfC*mAfC*mC | | XXOXOXOXOXOXOXXXXXXXXX |
| 6167 | U | | *fC*mA*fC*mU*fG*mC*T*mU | | |
| WV- | TUCUGCUGGACAGCCCUUGGGT | 266 | T*fU*mCfU*mGfC*mUfG*mGfA*mCfA*mGfC*mC | | XXOXOXOXOXOXOXXXXXXXXX |
| 6168 | U | | *fC*mU*fU*mG*fG*mG*T*mU | | |
| WV- | TUGCUCCAGCGGGAUACCGGAT | 267 | T*fU*mGfC*mUfC*mCfA*mGfC*mGfG*mGfA*mU | | XXOXOXOXOXOXOXXXXXXXXX |
| 6169 | U | | *fA*mC*fC*mG*fG*mA*T*mU | | |
| WV- | TGGCUGGGAUCCUCCACGUCAT | 268 | T*fG*mGfC*mUfG*mGfG*mAfU*mCfC*mUfC*mC | | XXOXOXOXOXOXOXXXXXXXXX |
| 6170 | U | | *fA*mC*fG*mU*fC*mA*T*mU | | |
| WV- | TUCUUGUUACCCCCGCCAUGGT | 269 | T*fU*mCfU*mUfG*mUfU*mAfC*mCfC*mCfC*mG | | XXOXOXOXOXOXOXXXXXXXXX |
| 6171 | U | | *fC*mC*fA*mU*fG*mG*T*mU | | |
| WV- | TAGGGACCCUCUGCACUGGGCT | 270 | T*fA*mGfG*mGfA*mCfC*mCfU*mCfU*mGfC*mA | | XXOXOXOXOXOXOXXXXXXXXX |
| 6172 | U | | *fC*mU*fG*mG*fG*mC*T*mU | | |
| WV- | TCUGUUGGCUGCUCACUGGCAT | 271 | T*fC*mUfG*mUfU*mGfG*mCfU*mGfC*mUfC*mA | | XXOXOXOXOXOXOXXXXXXXXX |
| 6173 | U | | *fC*mU*fG*mG*fC*mA*T*mU | | |
| WV- | TCCUGAGGAUGGACCGCGGGGT | 272 | T*fC*mCfU*mGfA*mGfG*mAfU*mGfG*mAfCmC* | | XXOXOXOXOXOXOOXXXXXXXX |
| 6174 | U | | fG*mC*fG*mG*fG*mG*T*mU | | |
| WV- | TGUGCUUGGCUCCUGCCUGGGT | 273 | T*fG*mUfG*mCfU*mUfG*mGfC*mUfC*mCfUmG* | | XXOXOXOXOXOXOOXXXXXXXX |
| 6175 | U | | fC*mC*fU*mG*fG*mG*T*mU | | |
| WV- | TCUUGUUACCCCCGCCAUGGAT | 274 | T*fC*mUfU*mGfU*mUfA*mCfC*mCfC*mCfGmC* | | XXOXOXOXOXOXOOXXXXXXXX |
| 6176 | U | | fC*mA*fU*mG*fG*mA*T*mU | | |
| WV- | TUACCCCCGCCAUGGAGACGUTU | 275 | T*fU*mAfC*mCfC*mCfC*mGfC*mCfA*mUfGmG* | | XXOXOXOXOXOXOOXXXXXXXX |
| 6177 | | | fA*mG*fA*mC*fG*mU*T*mU | | |
| WV- | TCCCCCGCCAUGGAGACGUUUT | 276 | T*fC*mCfC*mCfC*mGfC*mCfA*mUfG*mGfAmG* | | XXOXOXOXOXOXOOXXXXXXXX |
| 6178 | U | | fA*mC*fG*mU*fU*mU*T*mU | | |
| WV- | TACCUGAGGAUGGACCGCGGGT | 277 | T*fA*mCfC*mUfG*mAfG*mGfA*mUfG*mGfAmC* | | XXOXOXOXOXOXOOXXXXXXXX |
| 6179 | U | | fC*mG*fC*mG*fG*mG*T*mU | | |
| WV- | TGACCUGAGGAUGGACCGCGGT | 278 | T*fG*mAfC*mCfU*mGfA*mGfG*mAfU*mGfGmA* | | XXOXOXOXOXOXOOXXXXXXXX |
| 6180 | U | | fC*mC*fG*mC*fG*mG*T*mU | | |
| WV- | TACCCCCGCCAUGGAGACGUUTU | 279 | T*fA*mCfC*mCfC*mCfG*mCfC*mAfU*mGfGmA* | | XXOXOXOXOXOXOOXXXXXXXX |
| 6181 | | | fG*mA*fC*mG*fU*mU*T*mU | | |
| WV- | TGGACCCUCUGCACUGGGCUUT | 280 | T*fG*mGfA*mCfC*mCfU*mCfU*mGfC*mAfCmU* | | XXOXOXOXOXOXOOXXXXXXXX |
| 6182 | U | | fG*mG*fG*mC*fU*mU*T*mU | | |
| WV- | TCUGCUGGACAGCCCUUGGGGT | 281 | T*fC*mUfG*mCfU*mGfG*mAfC*mAfG*mCfCmC* | | XXOXOXOXOXOXOOXXXXXXXX |
| 6183 | U | | fU*mU*fG*mG*fG*mG*T*mU | | |
| WV- | TUGCACUGGGCUUCCUGGUGUT | 282 | T*fU*mGfC*mAfC*mUfG*mGfG*mCfU*mUfCmC* | | XXOXOXOXOXOXOOXXXXXXXX |
| 6184 | U | | fU*mG*fG*mU*fG*mU*T*mU | | |
| WV- | TGGACCUGAGGAUGGACCGCGT | 283 | T*fG*mGfA*mCfC*mUfG*mAfG*mGfA*mUfGmG* | | XXOXOXOXOXOXOOXXXXXXXX |
| 6185 | U | | fA*mC*fC*mG*fC*mG*T*mU | | |
| WV- | TGGGACCCUCUGCACUGGGCUT | 284 | T*fG*mGfG*mAfC*mCfC*mUfC*mUfG*mCfAmC* | | XXOXOXOXOXOXOOXXXXXXXX |
| 6186 | U | | fU*mG*fG*mG*fC*mU*T*mU | | |
| WV- | TUUGUUACCCCCGCCAUGGAGT | 285 | T*fU*mUfG*mUfU*mAfC*mCfC*mCfC*mGfCmC* | | XXOXOXOXOXOXOOXXXXXXXX |
| 6187 | U | | fA*mU*fG*mG*fA*mG*T*mU | | |
| WV- | TCCUGUGAGGUCACCCACUGCT | 286 | T*fC*mCfU*mGfU*mGfA*mGfG*mUfC*mAfCmC* | | XXOXOXOXOXOXOOXXXXXXXX |
| 6188 | U | | fC*mA*fC*mU*fG*mC*T*mU | | |
| WV- | TUCUGCUGGACAGCCCUUGGGT | 287 | T*fU*mCfU*mGfC*mUfG*mGfA*mCfA*mGfCmC* | | XXOXOXOXOXOXOOXXXXXXXX |
| 6189 | U | | fC*mU*fU*mG*fG*mG*T*mU | | |
| WV- | TUGCUCCAGCGGGAUACCGGAT | 288 | T*fU*mGfC*mUfC*mCfA*mGfC*mGfG*mGfAmU* | | XXOXOXOXOXOXOOXXXXXXXX |
| 6190 | U | | fA*mC*fC*mG*fG*mA*T*mU | | |
| WV- | TGGCUGGGAUCCUCCACGUCAT | 289 | T*fG*mGfC*mUfG*mGfG*mAfU*mCfC*mUfCmC* | | XXOXOXOXOXOXOOXXXXXXXX |
| 6191 | U | | fA*mC*fG*mU*fC*mA*T*mU | | |
| WV- | TUCUUGUUACCCCCGCCAUGGT | 290 | T*fU*mCfU*mUfG*mUfU*mAfC*mCfC*mCfCmG* | | XXOXOXOXOXOXOOXXXXXXXX |
| 6192 | U | | fC*mC*fA*mU*fG*mG*T*mU | | |
| WV- | TAGGGACCCUCUGCACUGGGCT | 291 | T*fA*mGfG*mGfA*mCfC*mCfU*mCfU*mGfCmA* | | XXOXOXOXOXOXOOXXXXXXXX |
| 6193 | U | | fC*mU*fG*mG*fG*mC*T*mU | | |
| WV- | TCUGUUGGCUGCUCACUGGCAT | 292 | T*fC*mUfG*mUfU*mGfG*mCfU*mGfC*mUfCmA* | | XXOXOXOXOXOXOOXXXXXXXX |
| 6194 | U | | fC*mU*fG*mG*fC*mA*T*mU | | |
| WV- | ACCCCGCGGU | 293 | rArCrCrCrCrGrCrGrGrUrCrCrArUrCrCrUrCrA | | OOOOOOOOOOOOO |
| 6574 | CCAUCCUCAGGUCCAGC | | rGrGrUrCrCrArGrC | | OOOOOOOOOOOOO |
| WV- | AUGACACCAG | 294 | rArUrGrArCrArCrCrArGrG | | OOOOOOOOOOOOO |
| 6575 | GAAGCCCAGUGCAGAGG | | rArArGrCrCrCrArGrUrGrCrArGrArGrG | | OOOOOOOOOOOOO |
| WV- | GAAGCCCAGU | 295 | rGrArArGrCrCrCrArGrUrG | | OOOOOOOOOOOOO |
| 6576 | GCAGAGGGUCCCUUACU | | rCrArGrArGrGrGrUrCrCrCrUrUrArCrU | | OOOOOOOOOOOOO |
| WV- | AACGUCUCCA | 296 | rArArCrGrUrCrUrCrCrArU | | OOOOOOOOOOOOO |
| 6577 | UGGCGGGGGUAACAAGA | | rGrGrCrGrGrGrGrGrUrArArCrArArGrA | | OOOOOOOOOOOOO |
| WV- | TGCCACUGUAGAAAGGAAUGAT | 297 | T*fG*mCfC*mAfC*mUfG*mUfA*mGfA*mAfA* | | XXOXOXOXOXOXOXOOOOOOX |
| 6585 | U | | mGfGmAfAmUfGmA*T*mU | | X |
| WV- | TGCCACUGUAGAAAGGGAUGAT | 298 | T*fG*mCfC*mAfC*mUfG*mUfA*mGfA*mAfA* | | XXOXOXOXOXOXOXOOOOOOX |
| 6586 | U | | mGfGmGfAmUfGmA*T*mU | | X |
| WV- | TGCCACUGUAGAAAGGUAUGAT | 299 | T*fG*mCfC*mAfC*mUfG*mUfA*mGfA*mAfA* | | XXOXOXOXOXOXOXOOOOOOX |
| 6587 | U | | mGfGmUfAmUfGmA*T*mU | | X |
| WV- | TGCCACUGUAGAAGGGCAUGAT | 300 | T*fG*mCfC*mAfC*mUfG*mUfA*mGfA*mAfG* | | XXOXOXOXOXOXOXOOOOOOX |
| 6588 | U | | mGfGmCfAmUfGmA*T*mU | | X |
| WV- | TGCCACUGUAGAACGGCAUGAT | 301 | T*fG*mCfC*mAfC*mUfG*mUfA*mGfA*mAfC* | | XXOXOXOXOXOXOXOOOOOOX |
| 6589 | U | | mGfGmCfAmUfGmA*T*mU | | X |
| WV- | TGCCACUGUAGAAUGGCAUGAT | 302 | T*fG*mCfC*mAfC*mUfG*mUfA*mGfA*mAfU* | | XXOXOXOXOXOXOXOOOOOOX |
| 6590 | U | | mGfGmCfAmUfGmA*T*mU | | X |
| WV- | TGCCACUGUAGAAGGGGAUGAT | 303 | T*fG*mCfC*mAfC*mUfG*mUfA*mGfA*mAfG* | | XXOXOXOXOXOXOXOOOOOOX |
| 6591 | U | | mGfGmGfAmUfGmA*T*mU | | X |
| WV- | TGCCACUGUA | 304 | T*fG*mCfC*mAfC*mUfG*mUfA*mGfA*mAfA* | | XXOXOXOXOXOXOXOOOOOOO |
| 6592 | GAAAGGCAUGAAGTU | | mGfGmCfAmUfGmAfAmG*T*mU | | OXX |
| WV- | TGCCACUGUA | 305 | T*fG*mCfC*mAfC*mUfG*mUfA*mGfA*mAfA* | | XXOXOXOXOXOXOXOOOOOOO |
| 6593 | GAAAGGCAUGAATU | | mGfGmCfAmUfGmAfA*T*mU | | XX |
| WV- | TGCCACUGUAGAAAGGCAUGTU | 306 | T*fG*mCfC*mAfC*mUfG*mUfA*mGfA*mAfA* | | XXOXOXOXOXOXOXOOOOOXX |
| 6594 | | | mGfGmCfAmUfG*T*mU | | |
| WV- | TGCCACUGUAGAAAGGCATU | 307 | T*fG*mCfC*mAfC*mUfG*mUfA*mGfA*mAfA* | | XXOXOXOXOXOXOXOOOXX |
| 6595 | | | mGfGmCfA*T*mU | | |
| WV- | TGCCACUGUAGAAAGGCTU | 308 | T*fG*mCfC*mAfC*mUfG*mUfA*mGfA*mAfA* | | XXOXOXOXOXOXOXOOXX |
| 6596 | | | mGfGmC*T*mU | | |
| WV- | TGCCACUGUAGAAAGGCAGG | 309 | T*fG*mCfC*mAfC*mUfG*mUfA*mGfA*mAfA* | | XXOXOXOXOXOXOXOOOXX |
| 6597 | | | mGfGmCfA*G*mG | | |
| WV- | TGCCACUGUAGAAAGGCGG | 310 | T*fG*mCfC*mAfC*mUfG*mUfA*mGfA*mAfA* | | XXOXOXOXOXOXOXOOXX |
| 6598 | | | mGfGmC*G*mG | | |
| WV- | TGCCACUGUAGAAAGGCAUGAT | 311 | T*fG*mC*fC*mA*fC*mU*fG*mU*fA*mG*fA* | | XXXXXXXXXXXXXXXXXXXXXX |
| 6599 | U | | mA*fA*mG*fG*mC*fA*mU*fG*mA*T*mU | | |
| WV- | TGCCACUGUAGAAAGGCAUGAT | 312 | T*fGmCfCmAfCmUfGmUfA | | XOOOOOOOOOOO |
| 6600 | U | | mGfAmAfAmGfGmCfAmUfGmAT*mU | | OOOOOOOOOX |
| WV- | TGCCACUGUAGAAAGGCAUGAT | 313 | T*fG*mCfC*mAfC*mUfG*mUfA*mGfA*mAfA* | | XXOXOXOXOXOXOXOXOXOXXX |
| 6601 | U | | mGfG*mCfA*mUfG*mA*T*mU | | |
| WV- | TGCCACUGUAGAAAGGCAUGAT | 314 | T*fG*mC*fCmA*fCmU*fGmU*fAmG*fAmA*fAmG | | XXXOXOXOXOXOXOXOXOXOXX |
| 6602 | U | | *fGmC*fAmU*fGmA*T*mU | | |
| WV- | TGCCACUGUAGAAAGGCAUGAT | 315 | TfG*mCfC*mAfC*mUfG*mUfA*mGfA*mAfA* | | OXOXOXOXOXOXOXOOOOOOX |
| 6603 | U | | mGfGmCfAmUfGmA*T*mU | | X |
| WV- | TGCCACUGUAGAAAGGCAUGAT | 316 | T*fGmCfC*mAfC*mUfG*mUfA*mGfA*mAfA* | | XOOXOXOXOXOXOXOOOOOOX |
| 6604 | U | | mGfGmCfAmUfGmA*T*mU | | X |
| WV- | TGCCACUGUAGAAAGGCAUGAT | 317 | T*fG*mC*fC*mAfC*mUfG*mUfA*mGfA*mAfA* | | XXXXOXOXOXOXOXOOOOOOX |
| 6605 | U | | mGfGmCfAmUfGmA*T*mU | | X |
| WV- | TGCCACUGUAGAAAGGCAUGAT | 318 | T*fG*mCfCmAfC*mUfG*mUfA*mGfA*mAfA* | | XXOOOXOXOXOXOXOOOOOOX |
| 6606 | U | | mGfGmCfAmUfGmA*T*mU | | X |
| WV- | TGCCACUGUAGAAAGGCAUGAT | 319 | T*fG*mCfC*mA*fC*mUfG*mUfA*mGfA*mAfA* | | XXOXXXOXOXOXOXOOOOOOX |
| 6607 | U | | mGfGmCfAmUfGmA*T*mU | | X |
| WV- | TGCCACUGUAGAAAGGCAUGAT | 320 | T*fG*mCfC*mAfCmUfG*mUfA*mGfA*mAfA* | | XXOXOOOXOXOXOXOOOOOOX |
| 6608 | U | | mGfGmCfAmUfGmA*T*mU | | X |
| WV- | TGCCACUGUAGAAAGGCAUGAT | 321 | T*fG*mCfC*mAfC*mU*fG*mUfA*mGfA*mAfA* | | XXOXOXXXOXOXOXOOOOOOX |
| 6609 | U | | mGfGmCfAmUfGmA*T*mU | | X |
| WV- | TGCCACUGUAGAAAGGCAUGAT | 322 | T*fG*mCfC*mAfC*mUfGmUfA*mGfA*mAfA* | | XXOXOXOOOXOXOXOOOOOOX |
| 6610 | U | | mGfGmCfAmUfGmA*T*mU | | X |
| WV- | TGCCACUGUAGAAAGGCAUGAT | 323 | T*fG*mCfC*mAfC*mUfG*mU*fA*mGfA*mAfA* | | XXOXOXOXXXOXOXOOOOOOX |
| 6611 | U | | mGfGmCfAmUfGmA*T*mU | | X |
| WV- | TGCCACUGUAGAAAGGCAUGAT | 324 | T*fG*mCfC*mAfC*mUfG*mUfAmGfA*mAfA* | | XXOXOXOXOOOXOXOOOOOOX |
| 6612 | U | | mGfGmCfAmUfGmA*T*mU | | X |
| WV- | TGCCACUGUAGAAAGGCAUGAT | 325 | T*fG*mCfC*mAfC*mUfG*mUfA*mG*fA*mAfA* | | XXOXOXOXOXXXOXOOOOOOX |
| 6613 | U | | mGfGmCfAmUfGmA*T*mU | | X |
| WV- | TGCCACUGUAGAAAGGCAUGAT | 326 | T*fG*mCfC*mAfC*mUfG*mUfA*mGfAmAfA* | | XXOXOXOXOXOOOXOOOOOOX |
| 6614 | U | | mGfGmCfAmUfGmA*T*mU | | X |
| WV- | TGCCACUGUAGAAAGGCAUGAT | 327 | T*fG*mCfC*mAfC*mUfG*mUfA*mGfA*mA*fA* | | XXOXOXOXOXOXXXOOOOOOX |
| 6615 | U | | mGfGmCfAmUfGmA*T*mU | | X |
| WV- | TGCCACUGUAGAAAGGCAUGAT | 328 | T*fG*mCfC*mAfC*mUfG*mUfA*mGfA*mAfA*mG | | XXOXOXOXOXOXOXXOOOOOX |
| 6616 | U | | *fGmCfAmUfGmA*T*mU | | X |
| WV- | TGCCACUGUAGAAAGGCAUGAT | 329 | T*fG*mCfC*mAfC*mUfG*mUfA*mGfA*mAfA* | | XXOXOXOXOXOXOXOXOOOOX |
| 6617 | U | | mGfG*mCfAmUfGmA*T*mU | | X |
| WV- | TGCCACUGUAGAAAGGCAUGAT | 330 | T*fG*mCfC*mAfC*mUfG*mUfA*mGfA*mAfA* | | XXOXOXOXOXOXOXOOXOOOX |
| 6618 | U | | mGfGmC*fAmUfGmA*T*mU | | X |
| WV- | TGCCACUGUAGAAAGGCAUGAT | 331 | T*fG*mCfC*mAfC*mUfG*mUfA*mGfA*mAfA* | | XXOXOXOXOXOXOXOOOXOOX |
| 6619 | U | | mGfGmCfA*mUfGmA*T*mU | | X |
| WV- | TGCCACUGUAGAAAGGCAUGAT | 332 | T*fG*mCfC*mAfC*mUfG*mUfA*mGfA*mAfA* | | XXOXOXOXOXOXOXOOOOXOX |
| 6620 | U | | mGfGmCfAmU*fGmA*T*mU | | X |
| WV- | TGCCACUGUAGAAAGGCAUGAT | 333 | T*fG*mCfC*mAfC*mUfG*mUfA*mGfA*mAfA* | | XXOXOXOXOXOXOXOOOOOXX |
| 6621 | U | | mGfGmCfAmUfG*mA*T*mU | | X |
| WV- | TGCCACUGUAGAAAGGCAUGAT | 334 | T*fG*mCfC*mAfC*mUfG*mUfA*mGfA*mAfA* | | XXOXOXOXOXOXOXOOOOOOX |
| 6622 | A | | mGfGmCfAmUfGmA*T*mA | | X |
| WV- | TGCCACUGUAGAAAGGCAUGAT | 335 | T*fG*mCfC*mAfC*mUfG*mUfA*mGfA*mAfA* | | XXOXOXOXOXOXOXOOOOOOX |
| 6623 | G | | mGfGmCfAmUfGmA*T*mG | | X |
| WV- | TGCCACUGUAGAAAGGCAUGAT | 336 | T*fG*mCfC*mAfC*mUfG*mUfA*mGfA*mAfA* | | XXOXOXOXOXOXOXOOOOOOX |
| 6624 | C | | mGfGmCfAmUfGmA*T*mC | | X |
| WV- | TGCCACUGUAGAAAGGCAUTA | 337 | T*fG*mCfC*mAfC*mUfG*mUfA*mGfA*mAfA* | | XXOXOXOXOXOXOXOOOOXX |
| 6625 | | | mGfGmCfAmU*T*mA | | |
| WV- | TGCCACUGUAGAAAGGCAUTG | 338 | T*fG*mCfC*mAfC*mUfG*mUfA*mGfA*mAfA* | | XXOXOXOXOXOXOXOOOOXX |
| 6626 | | | mGfGmCfAmU*T*mG | | |
| WV- | TGCCACUGUAGAAAGGCAUTC | 339 | T*fG*mCfC*mAfC*mUfG*mUfA*mGfA*mAfA* | | XXOXOXOXOXOXOXOOOOXX |
| 6627 | | | mGfGmCfAmU*T*mC | | |
| WV- | TGCCACUGUAGAAAGGCAUGAT | 340 | T*fG*mCmC*mAmC*mUmG*mUmA*mGmA*mAfA | | XXOXOXOXOXOXOXOOOOOOX |
| 6628 | U | | *mGmGmCmAmUmGmA*T*mU | | X |
| WV- | TGCCACUGUAGAAAGGCAUGAT | 341 | T*fG*mCmC*mAfC*mUmG*mUmA*mGmA*mAfA | | XXOXOXOXOXOXOXOOOOOOX |
| 6629 | U | | *mGfGmCmAmUmGmA*T*mU | | X |
| WV- | TGCCACUGUAGAAAGGCAUGAT | 342 | T*fG*mCmC*mAfC*mUfG*fUmA*mGmA*mAfA* | | XXOXOXOXOXOXOXOOOOOOX |
| 6630 | U | | mGfGmCmAmUmGmA*T*mU | | X |
| WV- | TGCCACUGUAGAAAGGCAUGAT | 343 | T*fG*mCmC*mAfC*mUfG*mUfA*mGmA*mAfA* | | XXOXOXOXOXOXOXOOOOOOX |
| 6631 | U | | mGfGmCfAmUmGmA*T*mU | | X |
| WV- | TGCCACUGUAGAAAGGCAUGAT | 344 | T*mG*mCfC*mAfC*mUfG*mUfA*mGfA*mAfA* | | XXOXOXOXOXOXOXOOOOOOX |
| 6632 | U | | mGfGmCfAmUfGmA*T*mU | | X |
| WV- | TGCCACUGUAGAAAGGCAUGAT | 345 | T*fG*fCfC*mAfC*mUfG*mUfA*mGfA*mAfA* | | XXOXOXOXOXOXOXOOOOOOX |
| 6633 | U | | mGfGmCfAmUfGmA*T*mU | | X |
| WV- | TGCCACUGUAGAAAGGCAUGAT | 346 | T*fG*mCmC*mAfC*mUfG*mUfA*mGfA*mAfA* | | XXOXOXOXOXOXOXOOOOOOX |
| 6634 | U | | mGfGmCfAmUfGmA*T*mU | | X |
| WV- | TGCCACUGUAGAAAGGCAUGAT | 347 | T*fG*mCfC*fAfC*mUfG*mUfA*mGfA*mAfA* | | XXOXOXOXOXOXOXOOOOOOX |
| 6635 | U | | mGfGmCfAmUfGmA*T*mU | | X |
| WV- | TGCCACUGUAGAAAGGCAUGAT | 348 | T*fG*mCfC*mAmC*mUfG*mUfA*mGfA*mAfA* | | XXOXOXOXOXOXOXOOOOOOX |
| 6636 | U | | mGfGmCfAmUfGmA*T*mU | | X |
| WV- | TGCCACUGUAGAAAGGCAUGAT | 349 | T*fG*mCfC*mAfC*fUfG*mUfA*mGfA*mAfA* | | XXOXOXOXOXOXOXOOOOOOX |
| 6637 | U | | mGfGmCfAmUfGmA*T*mU | | X |
| WV- | TGCCACUGUAGAAAGGCAUGAT | 350 | T*fG*mCfC*mAfC*mUmG*mUfA*mGfA*mAfA* | | XXOXOXOXOXOXOXOOOOOOX |
| 6638 | U | | mGfGmCfAmUfGmA*T*mU | | X |
| WV- | TGCCACUGUAGAAAGGCAUGAT | 351 | T*fG*mCfC*mAfC*mUfG*fUfA*mGfA*mAfA* | | XXOXOXOXOXOXOXOOOOOOX |
| 6639 | U | | mGfGmCfAmUfGmA*T*mU | | X |
| WV- | TGCCACUGUAGAAAGGCAUGAT | 352 | T*fG*mCfC*mAfC*mUfG*mUmA*mGfA*mAfA* | | XXOXOXOXOXOXOXOOOOOOX |
| 6640 | U | | mGfGmCfAmUfGmA*T*mU | | X |
| WV- | TGCCACUGUAGAAAGGCAUGAT | 353 | T*fG*mCfC*mAfC*mUfG*mUfA*fGfA*mAfA* | | XXOXOXOXOXOXOXOOOOOOX |
| 6641 | U | | mGfGmCfAmUfGmA*T*mU | | X |
| WV- | TGCCACUGUAGAAAGGCAUGAT | 354 | T*fG*mCfC*mAfC*mUfG*mUfA*mGmA*mAfA* | | XXOXOXOXOXOXOXOOOOOOX |
| 6642 | U | | mGfGmCfAmUfGmA*T*mU | | X |
| WV- | TGCCACUGUAGAAAGGCAUGAT | 355 | T*fG*mCfC*mAfC*mUfG*mUfA*mGfA*fAfA* | | XXOXOXOXOXOXOXOOOOOOX |
| 6643 | U | | mGfGmCfAmUfGmA*T*mU | | X |
| WV- | TGCCACUGUAGAAAGGCAUGAT | 356 | T*fG*mCfC*mAfC*mUfG*mUfA*mGfA*mAmA* | | XXOXOXOXOXOXOXOOOOOOX |
| 6644 | U | | mGfGmCfAmUfGmA*T*mU | | X |
| WV- | TGCCACUGUAGAAAGGCAUGAT | 357 | T*fG*mCfC*mAfC*mUfG*mUfA*mGfA*mAfA* | | XXOXOXOXOXOXOXOOOOOOX |
| 6645 | U | | fGfGmCfAmUfGmA*T*mU | | X |
| WV- | TGCCACUGUAGAAAGGCAUGAT | 358 | T*fG*mCfC*mAfC*mUfG*mUfA*mGfA*mAfA* | | XXOXOXOXOXOXOXOOOOOOX |
| 6646 | U | | mGmGmCfAmUfGmA*T*mU | | X |
| WV- | TGCCACUGUAGAAAGGCAUGAT | 359 | T*fG*mCfC*mAfC*mUfG*mUfA*mGfA*mAfA* | | XXOXOXOXOXOXOXOOOOOOX |
| 6647 | U | | mGfGfCfAmUfGmA*T*mU | | X |
| WV- | TGCCACUGUAGAAAGGCAUGAT | 360 | T*fG*mCfC*mAfC*mUfG*mUfA*mGfA*mAfA* | | XXOXOXOXOXOXOXOOOOOOX |
| 6648 | U | | mGfGmCmAmUfGmA*T*mU | | X |
| WV- | TGCCACUGUAGAAAGGCAUGAT | 361 | T*fG*mCfC*mAfC*mUfG*mUfA*mGfA*mAfA* | | XXOXOXOXOXOXOXOOOOOOX |
| 6649 | U | | mGfGmCfAfUfGmA*T*mU | | X |
| WV- | TGCCACUGUAGAAAGGCAUGAT | 362 | T*fG*mCfC*mAfC*mUfG*mUfA*mGfA*mAfA* | | XXOXOXOXOXOXOXOOOOOOX |
| 6650 | U | | mGfGmCfAmUmGmA*T*mU | | X |
| WV- | TGCCACUGUAGAAAGGCAUGAT | 363 | T*fG*mCfC*mAfC*mUfG*mUfA*mGfA*mAfA* | | XXOXOXOXOXOXOXOOOOOOX |
| 6651 | U | | mGfGmCfAmUfGfAT*mU | | X |
| WV- | UGCCACUGUAGAAAGGCAUGAT | 364 | fU*fG*mCfC*mAfC*mUfG*mUfA*mGfA*mAfA* | | XXOXOXOXOXOXOXOOOOOOX |
| 6652 | U | | mGfGmCfAmUfGmA*T*mU | | X |
| WV- | AGCCACUGUAGAAAGGCAUGAT | 365 | fA*fG*mCfC*mAfC*mUfG*mUfA*mGfA*mAfA* | | XXOXOXOXOXOXOXOOOOOOX |
| 6653 | U | | mGfGmCfAmUfGmA*T*mU | | X |
| WV- | GGCCACUGUAGAAAGGCAUGAT | 366 | fG*fG*mCfC*mAfC*mUfG*mUfA*mGfA*mAfA* | | XXOXOXOXOXOXOXOOOOOOX |
| 6654 | U | | mGfGmCfAmUfGmA*T*mU | | X |
| WV- | CGCCACUGUAGAAAGGCAUGAT | 367 | fC*fG*mCfC*mAfC*mUfG*mUfA*mGfA*mAfA* | | XXOXOXOXOXOXOXOOOOOOX |
| 6655 | U | | mGfGmCfAmUfGmA*T*mU | | X |
| WV- | UGCCACUGUAGAAAGGCAUGAT | 368 | mU*fG*mCfC*mAfC*mUfG*mUfA*mGfA*mAfA* | | XXOXOXOXOXOXOXOOOOOOX |
| 6656 | U | | mGfGmCfAmUfGmA*T*mU | | X |
| WV- | AGCCACUGUAGAAAGGCAUGAT | 369 | mA*fG*mCfC*mAfC*mUfG*mUfA*mGfA*mAfA* | | XXOXOXOXOXOXOXOOOOOOX |
| 6657 | U | | mGfGmCfAmUfGmA*T*mU | | X |
| WV- | GGCCACUGUAGAAAGGCAUGAT | 370 | mG*fG*mCfC*mAfC*mUfG*mUfA*mGfA*mAfA* | | XXOXOXOXOXOXOXOOOOOOX |
| 6658 | U | | mGfGmCfAmUfGmA*T*mU | | X |
| WV- | CGCCACUGUAGAAAGGCAUGAT | 371 | mC*fG*mCfC*mAfC*mUfG*mUfA*mGfA*mAfA* | | XXOXOXOXOXOXOXOOOOOOX |
| 6659 | U | | mGfGmCfAmUfGmA*T*mU | | X |
| WV- | TGCCACUGUAGAAAGGCAUGAT | 372 | T*fG*mCfC*mAfC*mUfG*mUfA*mGfA*mAfA* | | XXOXOXOXOXOXOXOOOOOOX |
| 6660 | U | | mGfGfCfAmUfGmA*T*mU | | X |
| WV- | TGCCACUGUAGAAAGGCAUGAT | 373 | T*Geo*mCfC*mAfC*mUfG*mUfA*mGfA*mAfA* | | XXOXOXOXOXOXOXOOOOOOX |
| 6661 | U | | mGfGmCfAmUfGmA*T*mU | | X |
| WV- | TGCCACUGUAGAAAGGCAUGAT | 374 | T*fG*m5CeofC*mAfC*mUfG*mUfA*mGfA*mAfA* | | XXOXOXOXOXOXOXOOOOOOX |
| 6662 | U | | mGfGmCfAmUfGmA*T*mU | | X |
| WV- | TGCCACUGUAGAAAGGCAUGAT | 375 | T*fG*mCm5Ceo*mAfC*mUfG*mUfA*mGfA*mAfA | | XXOXOXOXOXOXOXOOOOOOX |
| 6663 | U | | *mGfGmCfAmUfGmA*T*mU | | X |
| WV- | TGCCACUGUAGAAAGGCAUGAT | 376 | T*fG*mCfC*AeofC*mUfG*mUfA*mGfA*mAfA* | | XXOXOXOXOXOXOXOOOOOOX |
| 6664 | U | | mGfGmCfAmUfGmA*T*mU | | X |
| WV- | TGCCACUGUAGAAAGGCAUGAT | 377 | T*fG*mCfC*mAm5Ceo*mUfG*mUfA*mGfA*mAfA | | XXOXOXOXOXOXOXOOOOOOX |
| 6665 | U | | *mGfGmCfAmUfGmA*T*mU | | X |
| WV- | TGCCACTGUAGAAAGGCAUGAT | 378 | T*fG*mCfC*mAfC*TeofG*mUfA*mGfA*mAfA* | | XXOXOXOXOXOXOXOOOOOOX |
| 6666 | U | | mGfGmCfAmUfGmA*T*mU | | X |
| WV- | TGCCACUGUAGAAAGGCAUGAT | 379 | T*fG*mCfC*mAfC*mUGeo*mUfA*mGfA*mAfA* | | XXOXOXOXOXOXOXOOOOOOX |
| 6667 | U | | mGfGmCfAmUfGmA*T*mU | | X |
| WV- | TGCCACUGTAGAAAGGCAUGAT | 380 | T*fG*mCfC*mAfC*mUfG*TeofA*mGfA*mAfA* | | XXOXOXOXOXOXOXOOOOOOX |
| 6668 | U | | mGfGmCfAmUfGmA*T*mU | | X |
| WV- | TGCCACUGUAGAAAGGCAUGAT | 381 | T*fG*mCfC*mAfC*mUfG*mUAeo*mGfA*mAfA* | | XXOXOXOXOXOXOXOOOOOOX |
| 6669 | U | | mGfGmCfAmUfGmA*T*mU | | X |
| WV- | TGCCACUGUAGAAAGGCAUGAT | 382 | T*fG*mCfC*mAfC*mUfG*mUfA*GeofA*mAfA* | | XXOXOXOXOXOXOXOOOOOOX |
| 6670 | U | | mGfGmCfAmUfGmA*T*mU | | X |
| WV- | TGCCACUGUAGAAAGGCAUGAT | 383 | T*fG*mCfC*mAfC*mUfG*mUfA*mGAeo*mAfA* | | XXOXOXOXOXOXOXOOOOOOX |
| 6671 | U | | mGfGmCfAmUfGmA*T*mU | | X |
| WV- | TGCCACUGUAGAAAGGCAUGAT | 384 | T*fG*mCfC*mAfC*mUfG*mUfA*mGfA*AeofA* | | XXOXOXOXOXOXOXOOOOOOX |
| 6672 | U | | mGfGmCfAmUfGmA*T*mU | | X |
| WV- | TGCCACUGUAGAAAGGCAUGAT | 385 | T*fG*mCfC*mAfC*mUfG*mUfA*mGfA*mAAeo* | | XXOXOXOXOXOXOXOOOOOOX |
| 6673 | U | | mGfGmCfAmUfGmA*T*mU | | X |
| WV- | TGCCACUGUAGAAAGGCAUGAT | 386 | T*fG*mCfC*mAfC*mUfG*mUfA*mGfA*mAfA* | | XXOXOXOXOXOXOXOOOOOOX |
| 6674 | U | | GeofGmCfAmUfGmA*T*mU | | X |
| WV- | TGCCACUGUAGAAAGGCAUGAT | 387 | T*fG*mCfC*mAfC*mUfG*mUfA*mGfA*mAfA* | | XXOXOXOXOXOXOXOOOOOOX |
| 6675 | U | | mGGeomCfAmUfGmA*T*mU | | X |
| WV- | TGCCACUGUAGAAAGGCAUGAT | 388 | T*fG*mCfC*mAfC*mUfG*mUfA*mGfA*mAfA* | | XXOXOXOXOXOXOXOOOOOOX |
| 6676 | U | | mGfGm5CeofAmUfGmA*T*mU | | X |
| WV- | TGCCACUGUAGAAAGGCAUGAT | 389 | T*fG*mCfC*mAfC*mUfG*mUfA*mGfA*mAfA* | | XXOXOXOXOXOXOXOOOOOOX |
| 6677 | U | | mGfGmCAeomUfGmA*T*mU | | X |
| WV- | TGCCACUGUAGAAAGGCATGAT | 390 | T*fG*mCfC*mAfC*mUfG*mUfA*mGfA*mAfA* | | XXOXOXOXOXOXOXOOOOOOX |
| 6678 | U | | mGfGmCfATeofGmA*T*mU | | X |
| WV- | TGCCACUGUAGAAAGGCAUGAT | 391 | T*fG*mCfC*mAfC*mUfG*mUfA*mGfA*mAfA* | | XXOXOXOXOXOXOXOOOOOOX |
| 6679 | U | | mGfGmCfAmUGeomA*T*mU | | X |
| WV- | TGCCACUGUAGAAAGGCAUGAT | 392 | T*fG*mCfC*mAfC*mUfG*mUfA*mGfA*mAfA* | | XXOXOXOXOXOXOXOOOOOOX |
| 6680 | U | | mGfGmCfAmUfGAeo*T*mU | | X |
| WV- | TGCCACUGUAGAAAGGCAUGAT | 393 | T*fG*m5CeofC*AeofC*mUfG*mUfA*mGfA*mAfA* | | XXOXOXOXOXOXOXOOOOOOX |
| 6681 | U | | mGfGmCfAmUfGmA*T*mU | | X |
| WV- | TGCCACTGUAGAAAGGCAUGAT | 394 | T*fG*mCfC*AeofC*TeofG*mUfA*mGfA*mAfA* | | XXOXOXOXOXOXOXOOOOOOX |
| 6682 | U | | mGfGmCfAmUfGmA*T*mU | | X |
| WV- | TGCCACTGUAGAAAGGCAUGAT | 395 | T*fG*m5CeofC*mAfC*TeofG*mUfA*mGfA*mAfA* | | XXOXOXOXOXOXOXOOOOOOX |
| 6683 | U | | mGfGmCfAmUfGmA*T*mU | | X |
| WV- | TGCCACTGUAGAAAGGCAUGAT | 396 | T*fG*m5CeofC*AeofC*TeofG*mUfA*mGfA*mAfA* | | XXOXOXOXOXOXOXOOOOOOX |
| 6684 | U | | mGfGmCfAmUfGmA*T*mU | | X |
| WV- | TGCCACUGUAGAAAGGCAUGAT | 397 | Teo*fG*mCfC*mAfC*mUfG*mUfA*mGfA*mAfA* | | XXOXOXOXOXOXOXOOOOOOX |
| 6685 | U | | mGfGmCfAmUfGmA*T*mU | | X |
| WV- | AGCCACUGUAGAAAGGCAUGAT | 398 | Aeo*fG*mCfC*mAfC*mUfG*mUfA*mGfA*mAfA* | | XXOXOXOXOXOXOXOOOOOOX |
| 6686 | U | | mGfGmCfAmUfGmA*T*mU | | X |
| WV- | GGCCACUGUAGAAAGGCAUGAT | 399 | Geo*fG*mCfC*mAfC*mUfG*mUfA*mGfA*mAfA* | | XXOXOXOXOXOXOXOOOOOOX |
| 6687 | U | | mGfGmCfAmUfGmA*T*mU | | X |
| WV- | CGCCACUGUAGAAAGGCAUGAT | 400 | m5Ceo*fG*mCfC*mAfC*mUfG*mUfA*mGfA*mAfA | | XXOXOXOXOXOXOXOOOOOOX |
| 6688 | U | | *mGfGmCfAmUfGmA*T*mU | | X |
| WV- | TGCCACUGUAGAAAGGCAUGAT | 401 | T*IG*mCfC*mAfC*mUfG*mUfA*mGfA*mAfA* | | XXOXOXOXOXOXOXOOOOOOX |
| 6689 | U | | mGfGmCfAmUfGmA*T*mU | | X |
| WV- | TGCCACUGUAGAAAGGCAUGAT | 402 | T*fG*m5ICfC*mAfC*mUfG*mUfA*mGfA*mAfA* | | XXOXOXOXOXOXOXOOOOOOX |
| 6690 | U | | mGfGmCfAmUfGmA*T*mU | | X |
| WV- | TGCCACUGUAGAAAGGCAUGAT | 403 | T*fG*mCm5IC*mAfC*mUfG*mUfA*mGfA*mAfA* | | XXOXOXOXOXOXOXOOOOOOX |
| 6691 | U | | mGfGmCfAmUfGmA*T*mU | | X |
| WV- | TGCCACUGUAGAAAGGCAUGAT | 404 | T*fG*mCfC*IAfC*mUfG*mUfA*mGfA*mAfA* | | XXOXOXOXOXOXOXOOOOOOX |
| 6692 | U | | mGfGmCfAmUfGmA*T*mU | | X |
| WV- | TGCCACUGUAGAAAGGCAUGAT | 405 | T*fG*mCfC*mAm5IC*mUfG*mUfA*mGfA*mAfA* | | XXOXOXOXOXOXOXOOOOOOX |
| 6693 | U | | mGfGmCfAmUfGmA*T*mU | | X |
| WV- | TGCCACTGUAGAAAGGCAUGAT | 406 | T*fG*mCfC*mAfC*ITfG*mUfA*mGfA*mAfA* | | XXOXOXOXOXOXOXOOOOOOX |
| 6694 | U | | mGfGmCfAmUfGmA*T*mU | | X |
| WV- | TGCCACUGUAGAAAGGCAUGAT | 407 | T*fG*mCfC*mAfC*mUIG*mUfA*mGfA*mAfA* | | XXOXOXOXOXOXOXOOOOOOX |
| 6695 | U | | mGfGmCfAmUfGmA*T*mU | | X |
| WV- | TGCCACUGTAGAAAGGCAUGAT | 408 | T*fG*mCfC*mAfC*mUfG*ITfA*mGfA*mAfA* | | XXOXOXOXOXOXOXOOOOOOX |
| 6696 | U | | mGfGmCfAmUfGmA*T*mU | | X |
| WV- | TGCCACUGUAGAAAGGCAUGAT | 409 | T*fG*mCfC*mAfC*mUfG*mUIA*mGfA*mAfA* | | XXOXOXOXOXOXOXOOOOOOX |
| 6697 | U | | mGfGmCfAmUfGmA*T*mU | | X |
| WV- | TGCCACUGUAGAAAGGCAUGAT | 410 | T*fG*mCfC*mAfC*mUfG*mUfA*IGfA*mAfA* | | XXOXOXOXOXOXOXOOOOOOX |
| 6698 | U | | mGfGmCfAmUfGmA*T*mU | | X |
| WV- | TGCCACUGUAGAAAGGCAUGAT | 411 | T*fG*mCfC*mAfC*mUfG*mUfA*mGIA*mAfA* | | XXOXOXOXOXOXOXOOOOOOX |
| 6699 | U | | mGfGmCfAmUfGmA*T*mU | | X |
| WV- | TGCCACUGUAGAAAGGCAUGAT | 412 | T*fG*mCfC*mAfC*mUfG*mUfA*mGfA*IAfA* | | XXOXOXOXOXOXOXOOOOOOX |
| 6700 | U | | mGfGmCfAmUfGmA*T*mU | | X |
| WV- | TGCCACUGUAGAAAGGCAUGAT | 413 | T*fG*mCfC*mAfC*mUfG*mUfA*mGfA*mAIA* | | XXOXOXOXOXOXOXOOOOOOX |
| 6701 | U | | mGfGmCfAmUfGmA*T*mU | | X |
| WV- | TGCCACUGUAGAAAGGCAUGAT | 414 | T*fG*mCfC*mAfC*mUfG*mUfA*mGfA*mAfA* | | XXOXOXOXOXOXOXOOOOOOX |
| 6702 | U | | IGfGmCfAmUfGmA*T*mU | | X |
| WV- | TGCCACUGUAGAAAGGCAUGAT | 415 | T*fG*mCfC*mAfC*mUfG*mUfA*mGfA*mAfA* | | XXOXOXOXOXOXOXOOOOOOX |
| 6703 | U | | mGIGmCfAmUfGmA*T*mU | | X |
| WV- | TGCCACUGUAGAAAGGCAUGAT | 416 | T*fG*mCfC*mAfC*mUfG*mUfA*mGfA*mAfA* | | XXOXOXOXOXOXOXOOOOOOX |
| 6704 | U | | mGfGm5ICfAmUfGmA*T*mU | | X |
| WV- | TGCCACUGUAGAAAGGCAUGAT | 417 | T*fG*mCfC*mAfC*mUfG*mUfA*mGfA*mAfA* | | XXOXOXOXOXOXOXOOOOOOX |
| 6705 | U | | mGfGmCIAmUfGmA*T*mU | | X |
| WV- | TGCCACUGUAGAAAGGCATGAT | 418 | T*fG*mCfC*mAfC*mUfG*mUfA*mGfA*mAfA* | | XXOXOXOXOXOXOXOOOOOOX |
| 6706 | U | | mGfGmCfAITfGmA*T*mU | | X |
| WV- | TGCCACUGUAGAAAGGCAUGAT | 419 | T*fG*mCfC*mAfC*mUfG*mUfA*mGfA*mAfA* | | XXOXOXOXOXOXOXOOOOOOX |
| 6707 | U | | mGfGmCfAmUIGmA*T*mU | | X |
| WV- | TGCCACUGUAGAAAGGCAUGAT | 420 | T*fG*mCfC*mAfC*mUfG*mUfA*mGfA*mAfA* | | XXOXOXOXOXOXOXOOOOOOX |
| 6708 | U | | mGfGmCfAmUfGIA*T*mU | | X |
| WV- | TGCCACUGUAGAAAGGCAUGAT | 421 | IT*fG*mCfC*mAfC*mUfG*mUfA*mGfA*mAfA* | | XXOXOXOXOXOXOXOOOOOOX |
| 6709 | U | | mGfGmCfAmUfGmA*T*mU | | X |
| WV- | AGCCACUGUAGAAAGGCAUGAT | 422 | IA*fG*mCfC*mAfC*mUfG*mUfA*mGfA*mAfA* | | XXOXOXOXOXOXOXOOOOOOX |
| 6710 | U | | mGfGmCfAmUfGmA*T*mU | | X |
| WV- | GGCCACUGUAGAAAGGCAUGAT | 423 | IG*fG*mCfC*mAfC*mUfG*mUfA*mGfA*mAfA* | | XXOXOXOXOXOXOXOOOOOOX |
| 6711 | U | | mGfGmCfAmUfGmA*T*mU | | X |
| WV- | CGCCACUGUAGAAAGGCAUGAT | 424 | m5IC*fG*mCfC*mAfC*mUfG*mUfA*mGfA*mAfA* | | XXOXOXOXOXOXOXOOOOOOX |
| 6712 | U | | mGfGmCfAmUfGmA*T*mU | | X |
| WV- | TGCCACUGUAGAAAGGCAUGAT | 425 | T*fG*m5ICfC*IAfC*mUfG*mUfA*mGfA*mAfA* | | XXOXOXOXOXOXOXOOOOOOX |
| 6713 | U | | mGfGmCfAmUfGmA*T*mU | | X |
| WV- | TGCCACTGUAGAAAGGCAUGAT | 426 | T*fG*mCfC*IAfC*ITfG*mUfA*mGfA*mAfA* | | XXOXOXOXOXOXOXOOOOOOX |
| 6714 | U | | mGfGmCfAmUfGmA*T*mU | | X |
| WV- | TGCCACTGUAGAAAGGCAUGAT | 427 | T*fG*m5ICfC*mAfC*ITfG*mUfA*mGfA*mAfA* | | XXOXOXOXOXOXOXOOOOOOX |
| 6715 | U | | mGfGmCfAmUfGmA*T*mU | | X |
| WV- | TGCCACTGUAGAAAGGCAUGAT | 428 | T*fG*m5ICfC*IAfC*ITfG*mUfA*mGfA*mAfA* | | XXOXOXOXOXOXOXOOOOOOX |
| 6716 | U | | mGfGmCfAmUfGmA*T*mU | | X |
| WV- | TGCCACUGUAGAAAGGCAUGAT | 429 | T*G*mCfC*mAfC*mUfG*mUfA*mGfA*mAfA* | | XXOXOXOXOXOXOXOOOOOOX |
| 6717 | U | | mGfGmCfAmUfGmA*T*mU | | X |
| WV- | TGCCACUGUAGAAAGGCAUGAT | 430 | T*fG*CfC*mAfC*mUfG*mUfA*mGfA*mAfA* | | XXOXOXOXOXOXOXOOOOOOX |
| 6718 | U | | mGfGmCfAmUfGmA*T*mU | | X |
| WV- | TGCCACUGUAGAAAGGCAUGAT | 431 | T*fG*mCfC*AfC*mUfG*mUfA*mGfA*mAfA* | | XXOXOXOXOXOXOXOOOOOOX |
| 6719 | U | | mGfGmCfAmUfGmA*T*mU | | X |
| WV- | TGCCACTGUAGAAAGGCAUGAT | 432 | T*fG*mCfC*mAfC*TfG*mUfA*mGfA*mAfA* | | XXOXOXOXOXOXOXOOOOOOX |
| 6720 | U | | mGfGmCfAmUfGmA*T*mU | | X |
| WV- | TGCCACUGTAGAAAGGCAUGAT | 433 | T*fG*mCfC*mAfC*mUfG*TfA*mGfA*mAfA* | | XXOXOXOXOXOXOXOOOOOOX |
| 6721 | U | | mGfGmCfAmUfGmA*T*mU | | X |
| WV- | TGCCACUGUAGAAAGGCAUGAT | 434 | T*fG*mCfC*mAfC*mUfG*mUA*mGfA*mAfA* | | XXOXOXOXOXOXOXOOOOOOX |
| 6722 | U | | mGfGmCfAmUfGmA*T*mU | | X |
| WV- | TGCCACUGUAGAAAGGCAUGAT | 435 | T*fG*mCfC*mAfC*mUfG*mUfA*GfA*mAfA* | | XXOXOXOXOXOXOXOOOOOOX |
| 6723 | U | | mGfGmCfAmUfGmA*T*mU | | X |
| WV- | TGCCACUGUAGAAAGGCAUGAT | 436 | T*fG*mCfC*mAfC*mUfG*mUfA*mGA*mAfA* | | XXOXOXOXOXOXOXOOOOOOX |
| 6724 | U | | mGfGmCfAmUfGmA*T*mU | | X |
| WV- | TGCCACUGUAGAAAGGCAUGAT | 437 | T*fG*mCfC*mAfC*mUfG*mUfA*mGfA*AfA* | | XXOXOXOXOXOXOXOOOOOOX |
| 6725 | U | | mGfGmCfAmUfGmA*T*mU | | X |
| WV- | TGCCACUGUAGAAAGGCAUGAT | 438 | T*fG*mCfC*mAfC*mUfG*mUfA*mGfA*mAA* | | XXOXOXOXOXOXOXOOOOOOX |
| 6726 | U | | mGfGmCfAmUfGmA*T*mU | | X |
| WV- | TGCCACUGUAGAAAGGCAUGAT | 439 | T*fG*mCfC*mAfC*mUfG*mUfA*mGfA*mAfA* | | XXOXOXOXOXOXOXOOOOOOX |
| 6727 | U | | GfGmCfAmUfGmA*T*mU | | X |
| WV- | TGCCACUGUAGAAAGGCAUGAT | 440 | T*fG*mCfC*mAfC*mUfG*mUfA*mGfA*mAfA* | | XXOXOXOXOXOXOXOOOOOOX |
| 6728 | U | | mGGmCfAmUfGmA*T*mU | | X |
| WV- | TGCCACUGUAGAAAGGCAUGAT | 441 | T*fG*mCfC*mAfC*mUfG*mUfA*mGfA*mAfA* | | XXOXOXOXOXOXOXOOOOOOX |
| 6729 | U | | mGfGCfAmUfGmA*T*mU | | X |
| WV- | TGCCACUGUAGAAAGGCAUGAT | 442 | T*fG*mCfC*mAfC*mUfG*mUfA*mGfA*mAfA* | | XXOXOXOXOXOXOXOOOOOOX |
| 6730 | U | | mGfGmCAmUfGmA*T*mU | | X |
| WV- | TGCCACUGUAGAAAGGCATGAT | 443 | T*fG*mCfC*mAfC*mUfG*mUfA*mGfA*mAfA* | | XXOXOXOXOXOXOXOOOOOOX |
| 6731 | U | | mGfGmCfATfGmA*T*mU | | X |
| WV- | TGCCACUGUAGAAAGGCAUGAT | 444 | T*fG*mCfC*mAfC*mUfG*mUfA*mGfA*mAfA* | | XXOXOXOXOXOXOXOOOOOOX |
| 6732 | U | | mGfGmCfAmUGmA*T*mU | | X |
| WV- | TGCCACUGUAGAAAGGCAUGAT | 445 | T*fG*mCfC*mAfC*mUfG*mUfA*mGfA*mAfA* | | XXOXOXOXOXOXOXOOOOOOX |
| 6733 | U | | mGfGmCfAmUfGA*T*mU | | X |
| WV- | AGCCACUGUAGAAAGGCAUGAT | 446 | A*fG*mCfC*mAfC*mUfG*mUfA*mGfA*mAfA* | | XXOXOXOXOXOXOXOOOOOOX |
| 6734 | U | | mGfGmCfAmUfGmA*T*mU | | X |
| WV- | GGCCACUGUAGAAAGGCAUGAT | 447 | G*fG*mCfC*mAfC*mUfG*mUfA*mGfA*mAfA* | | XXOXOXOXOXOXOXOOOOOOX |
| 6735 | U | | mGfGmCfAmUfGmA*T*mU | | X |
| WV- | CGCCACUGUAGAAAGGCAUGAT | 448 | C*fG*mCfC*mAfC*mUfG*mUfA*mGfA*mAfA* | | XXOXOXOXOXOXOXOOOOOOX |
| 6736 | U | | mGfGmCfAmUfGmA*T*mU | | X |
| WV- | TGCCACUGUAGAAAGGCAUGAT | 449 | T*fG*CfC*AfC*mUfG*mUfA*mGfA*mAfA* | | XXOXOXOXOXOXOXOOOOOOX |
| 6737 | U | | mGfGmCfAmUfGmA*T*mU | | X |
| WV- | TGCCACTGUAGAAAGGCAUGAT | 450 | T*fG*mCfC*AfC*TfG*mUfA*mGfA*mAfA* | | XXOXOXOXOXOXOXOOOOOOX |
| 6738 | U | | mGfGmCfAmUfGmA*T*mU | | X |
| WV- | TGCCACTGUAGAAAGGCAUGAT | 451 | T*fG*CfC*mAfC*TfG*mUfA*mGfA*mAfA* | | XXOXOXOXOXOXOXOOOOOOX |
| 6739 | U | | mGfGmCfAmUfGmA*T*mU | | X |
| WV- | TGCCACTGUAGAAAGGCAUGAT | 452 | T*fG*CfC*AfC*TfG*mUfA*mGfA*mAfA* | | XXOXOXOXOXOXOXOOOOOOX |
| 6740 | U | | mGfGmCfAmUfGmA*T*mU | | X |
| WV- | TGCCACUGUAGAAAGGCATGAT | 453 | T*fG*mCfC*mAfC*mUfG*mUfA*mGfA*mAfA* | | XXOXOXOXOXOXOXOOOXXXXX |
| 6741 | U | | mGfGmCA*T*G*A*T*mU | | |
| WV- | TGCCACUGUAGAAAGGCATGAT | 454 | T*fG*mCfC*mAfC*mUfG*mUfA*mGfA*mAfA*G* | | XXOXOXOXOXOXOXXXXXXXXX |
| 6742 | U | | G*C*A*T*G*A*T*mU | | |
| WV- | TGUCACUGUAGAAAGGCAUGAT | 455 | T*fG*mUfC*mAfC*mUfG*mUfA*mGfA*mAfA* | | XXOXOXOXOXOXOXOOOOOOX |
| 6743 | U | | mGfGmCfAmUfGmA*T*mU | | X |
| WV- | TGCUACUGUAGAAAGGCAUGAT | 456 | T*fG*mCfU*mAfC*mUfG*mUfA*mGfA*mAfA* | | XXOXOXOXOXOXOXOOOOOOX |
| 6744 | U | | mGfGmCfAmUfGmA*T*mU | | X |
| WV- | TGCCGCUGUAGAAAGGCAUGAT | 457 | T*fG*mCfC*mGfC*mUfG*mUfA*mGfA*mAfA* | | XXOXOXOXOXOXOXOOOOOOX |
| 6745 | U | | mGfGmCfAmUfGmA*T*mU | | X |
| WV- | TGCCAUUGUAGAAAGGCAUGAT | 458 | T*fG*mCfC*mAfU*mUfG*mUfA*mGfA*mAfA* | | XXOXOXOXOXOXOXOOOOOOX |
| 6746 | U | | mGfGmCfAmUfGmA*T*mU | | X |
| WV- | TGCCACUGUGGAAAGGCAUGAT | 459 | T*fG*mCfC*mAfC*mUfG*mUfG*mGfA*mAfA* | | XXOXOXOXOXOXOXOOOOOOX |
| 6747 | U | | mGfGmCfAmUfGmA*T*mU | | X |
| WV- | TGCCACUGUAGGAAGGCAUGAT | 460 | T*fG*mCfC*mAfC*mUfG*mUfA*mGfG*mAfA* | | XXOXOXOXOXOXOXOOOOOOX |
| 6748 | U | | mGfGmCfAmUfGmA*T*mU | | X |
| WV- | TGCCACUGUAGAGAGGCAUGAT | 461 | T*fG*mCfC*mAfC*mUfG*mUfA*mGfA*mGfA* | | XXOXOXOXOXOXOXOOOOOOX |
| 6749 | U | | mGfGmCfAmUfGmA*T*mU | | X |
| WV- | TGCCACUGUAGAAGGGCAUGAT | 462 | T*fG*mCfC*mAfC*mUfG*mUfA*mGfA*mAfG* | | XXOXOXOXOXOXOXOOOOOOX |
| 6750 | U | | mGfGmCfAmUfGmA*T*mU | | X |
| WV- | TGCCACUGUAGAAAGGUAUGAT | 463 | T*fG*mCfC*mAfC*mUfG*mUfA*mGfA*mAfA* | | XXOXOXOXOXOXOXOOOOOOX |
| 6751 | U | | mGfGmUfAmUfGmA*T*mU | | X |
| WV- | TGCCACUGUAGAAAGGCGUGAT | 464 | T*fG*mCfC*mAfC*mUfG*mUfA*mGfA*mAfA* | | XXOXOXOXOXOXOXOOOOOOX |
| 6752 | U | | mGfGmCfGmUfGmA*T*mU | | X |
| WV- | TGCCACUGUAGAAAGGCAUGGT | 465 | T*fG*mCfC*mAfC*mUfG*mUfA*mGfA*mAfA* | | XXOXOXOXOXOXOXOOOOOOX |
| 6753 | U | | mGfGmCfAmUfGmG*T*mU | | X |
| WV- | ACCUGAGGATGGACCGCGGG | 466 | mA*mC*mC*mU*mG*A*G*G*A*T*G*G*A* | | XXXXXXXXXXXXXXXXXXX |
| 6818 | | | C*C*mG*mC*mG*mG*mG | | |
| WV- | ACCTGAGGATGGACCGCGGG | 467 | Aeo*m5Ceo*m5Ceo*Teo*Geo*A*G*G*A*T*G* | | XXXXXXXXXXXXXXXXXXX |
| 6819 | | | G*A*C*C*Geo*m5Ceo*Geo*Geo*Geo | | |
| WV- | GGACCTGAGGATGGACCGCG | 468 | mG*mG*mA*mC*mC*T*G*A*G*G*A*T*G* | | XXXXXXXXXXXXXXXXXXX |
| 6820 | | | G*A*mC*mC*mG*mC*mG | | |
| WV- | GGACCTGAGGATGGACCGCG | 469 | Geo*Geo*Aeo*m5Ceo*m5Ceo*T*G*A*G*G*A | | XXXXXXXXXXXXXXXXXXX |
| 6821 | | | *T*G*G*A*m5Ceo*m5Ceo*Geo*m5Ceo*Geo | | |
| WV- | ACCUGAGGATGGACCGCGGG | 470 | Mod001L001mA*mC*mC*mU*mG*A*G*G*A*T | | OXXXXXXXXXXXXXXXXXXX |
| 6822 | | | *G*G*A*C*C*mG*mC*mG*mG*mG | | |
| WV- | ACCTGAGGATGGACCGCGGG | 471 | Mod001L001Aeo*m5Ceo*m5Ceo*Teo*Geo*A*G*G | | OXXXXXXXXXXXXXXXXXXX |
| 6823 | | | *A*T*G*G*A*C*C*Geo*m5Ceo*Geo*Geo* | | |
| | | | Geo | | |
| WV- | GGACCTGAGGATGGACCGCG | 472 | Mod001L001mG*mG*mA*mC*mC*T*G*A*G*G | | OXXXXXXXXXXXXXXXXXXX |
| 6824 | | | *A*T*G*G*A*mC*mC*mG*mC*mG | | |
| WV- | GGACCTGAGGATGGACCGCG | 473 | Mod001L001Geo*Geo*Aeo*m5Ceo*m5Ceo*T*G*A | | OXXXXXXXXXXXXXXXXXXX |
| 6825 | | | *G*G*A*T*G*G*A*m5Ceo*m5Ceo*Geo* | | |
| | | | m5Ceo*Geo | | |
| WV- | ACCUGAGGATGGACCGCGGG | 474 | L001mA*mC*mC*mU*mG*A*G*G*A*T*G*G* | | OXXXXXXXXXXXXXXXXXXX |
| 7113 | | | A*C*C*mG*mC*mG*mG*mG | | |
| WV- | ACCTGAGGATGGACCGCGGG | 475 | L001Aeo*m5Ceo*m5Ceo*Teo*Geo*A*G*G*A*T | | OXXXXXXXXXXXXXXXXXXX |
| 7114 | | | *G*G*A*C*C*Geo*m5Ceo*Geo*Geo*Geo | | |
| WV- | GGACCTGAGGATGGACCGCG | 476 | L001mG*mG*mA*mC*mC*T*G*A*G*G*A*T* | | OXXXXXXXXXXXXXXXXXXX |
| 7115 | | | G*G*A*mC*mC*mG*mC*mG | | |
| WV- | GGACCTGAGGATGGACCGCG | 477 | L001Geo*Geo*Aeo*m5Ceo*m5Ceo*T*G*A*G*G | | OXXXXXXXXXXXXXXXXXXX |
| 7116 | | | *A*T*G*G*A*m5Ceo*m5Ceo*Geo*m5Ceo*Geo | | |
| WV- | TGCCACUGUAGAAAGGCAUGAT | 478 | T*fG*mCfC*mAfC*mU*fG*mU*fA*mGfA*mAfA* | | XXOXOXXXXXOXOXOOXOXOXX |
| 7316 | U | | mGfGmC*fAmU*fGmA*T*mU | | |
| WV- | TGCCACUGUAGAAAGGCAUGAT | 479 | VPT*fG*mCfC*mAfC*mU*fG*mU*fA*mGfA* | | XXOXOXXXXXOXOXOOXOXOXX |
| 7317 | U | | mAfA*mGfGmC*fAmU*fGmA*T*mU | | |
| WV- | CCCCCAGGCA | 480 | rCrCrCrCrCrArGrGrCrArGrGrA | | OOOOOOOOOOO |
| 7403 | GGAGCCAAGCACAGCAG | | rGrCrCrArArGrCrArCrArGrCrArG | | OOOOOOOOOOOOOOO |
| WV- | TGCCACUGUAGAAAGGCAUGAT | 481 | T*fG*mCfC*mAfC*mU*fG*mU*fA*mGfA*mAfA* | | XXOXOXXXXXOXOXOOOOOOXX |
| 7462 | U | | mGfGmCfAmUfGmA*T*mU | | |
| WV- | TGCCACUGUAGAAAGGCAUGAT | 482 | T*fG*mCfC*mAfC*mUfG*mUfA*mGfA*mAfA* | | XXOXOXOXOXOXOXOOXOXOXX |
| 7463 | U | | mGfGmC*fAmU*fGmA*T*mU | | |
| WV- | TGCCACUGUAGAAAGGCAUGAT | 483 | T*SfG*SmCfC*SmAfC*SmUfG*SmUfA*SmGfA* | | SSOSOSOSOSOSOSOOOOOOSS |
| 7464 | U | | SmAfA*SmGfGmCfAmUfGmA*ST*SmU | | |
| WV- | TGCCACUGUAGAAAGGCAUGAT | 484 | T*SfG*SmCfC*SmAfC*SmUfG*SmUfA*SmGfA* | | SSOSOSOSOSOSOSSSSSSSSS |
| 7465 | U | | SmAfA*SmG*SfG*SmC*SfA*SmU*SfG*SmA*ST* | | |
| | | | SmU | | |
| WV- | TGCCACUGUAGAAAGGCAUGAT | 485 | T*SfG*SmCfC*SmAfC*SmU*SfG*SmU*SfA*SmGfA | | SSOSOSSSSSOSOSOOSOSOSS |
| 7466 | U | | *SmAfA*SmGfGmC*SfAmU*SfGmA*ST*SmU | | |
| WV- | TGCCACUGUAGAAAGGCAUGAT | 486 | T*SfG*SmCfC*SmAfC*SmU*SfG*SmU*SfA*SmGfA | | SSOSOSSSSSOSOSOOOOOOSS |
| 7467 | U | | *SmAfA*SmGfGmCfAmUfGmA*ST*SmU | | |
| WV- | TGCCACUGUAGAAAGGCAUGAT | 487 | T*SfG*SmCfC*SmAfC*SmUfG*SmUfA*SmGfA* | | SSOSOSOSOSOSOSOOSOSOSS |
| 7468 | U | | SmAfA*SmGfGmC*SfAmU*SfGmA*ST*SmU | | |
| WV- | TGCCACUGUAGAAAGGCAUGAT | 488 | T*SfG*mCfC*mAfC*mUfG*mUfA*mGfA*mAfA* | | SXOXOXOXOXOXOXOOOOOOX |
| 7469 | U | | mGfGmCfAmUfGmA*T*SmU | | S |
| WV- | TGCCACUGUAGAAAGGCAUGAT | 489 | T*SfG*SmCfC*mAfC*mUfG*mUfA*mGfA*mAfA* | | SSOXOXOXOXOXOXOOOOOOX |
| 7470 | U | | mGfGmCfAmUfGmA*T*SmU | | S |
| WV- | TGCCACUGUAGAAAGGCAUGAT | 490 | T*SfG*mC*SfC*mAfC*mUfG*mUfA*mGfA*mAfA* | | SXSXOXOXOXOXOXOOOOOOXS |
| 7471 | U | | mGfGmCfAmUfGmA*T*SmU | | |
| WV- | TGCCACUGUAGAAAGGCAUGAT | 491 | T*SfG*mCfC*SmAfC*mUfG*mUfA*mGfA*mAfA* | | SXOSOXOXOXOXOXOOOOOOX |
| 7472 | U | | mGfGmCfAmUfGmA*T*SmU | | S |
| WV- | TGCCACUGUAGAAAGGCAUGAT | 492 | T*SfG*mCfC*mA*SfC*mUfG*mUfA*mGfA*mAfA* | | SXOXSXOXOXOXOXOOOOOOXS |
| 7473 | U | | mGfGmCfAmUfGmA*T*SmU | | |
| WV- | TGCCACUGUAGAAAGGCAUGAT | 493 | T*SfG*mCfC*mAfC*SmUfG*mUfA*mGfA*mAfA* | | SXOXOSOXOXOXOXOOOOOOX |
| 7474 | U | | mGfGmCfAmUfGmA*T*SmU | | S |
| WV- | TGCCACUGUAGAAAGGCAUGAT | 494 | T*SfG*mCfC*mAfC*mU*SfG*mUfA*mGfA*mAfA* | | SXOXOXSXOXOXOXOOOOOOXS |
| 7475 | U | | mGfGmCfAmUfGmA*T*SmU | | |
| WV- | TGCCACUGUAGAAAGGCAUGAT | 495 | T*SfG*mCfC*mAfC*mUfG*SmUfA*mGfA*mAfA* | | SXOXOXOSOXOXOXOOOOOOX |
| 7476 | U | | mGfGmCfAmUfGmA*T*SmU | | S |
| WV- | TGCCACUGUAGAAAGGCAUGAT | 496 | T*SfG*mCfC*mAfC*mUfG*mU*SfA*mGfA*mAfA* | | SXOXOXOXSXOXOXOOOOOOXS |
| 7477 | U | | mGfGmCfAmUfGmA*T*SmU | | |
| WV- | TGCCACUGUAGAAAGGCAUGAT | 497 | T*SfG*mCfC*mAfC*mUfG*mUfA*SmGfA*mAfA* | | SXOXOXOXOSOXOXOOOOOOX |
| 7478 | U | | mGfGmCfAmUfGmA*T*SmU | | S |
| WV- | TGCCACUGUAGAAAGGCAUGAT | 498 | T*SfG*mCfC*mAfC*mUfG*mUfA*mG*SfA*mAfA* | | SXOXOXOXOXSXOXOOOOOOXS |
| 7479 | U | | mGfGmCfAmUfGmA*T*SmU | | |
| WV- | TGCCACUGUAGAAAGGCAUGAT | 499 | T*SfG*mCfC*mAfC*mUfG*mUfA*mGfA*SmAfA* | | SXOXOXOXOXOSOXOOOOOOX |
| 7480 | U | | mGfGmCfAmUfGmA*T*SmU | | S |
| WV- | TGCCACUGUAGAAAGGCAUGAT | 500 | T*SfG*mCfC*mAfC*mUfG*mUfA*mGfA*mA*SfA* | | SXOXOXOXOXOXSXOOOOOOXS |
| 7481 | U | | mGfGmCfAmUfGmA*T*SmU | | |
| WV- | TGCCACUGUAGAAAGGCAUGAT | 501 | T*SfG*mCfC*mAfC*mUfG*mUfA*mGfA*mAfA* | | SXOXOXOXOXOXOSOOOOOOX |
| 7482 | U | | SmGfGmCfAmUfGmA*T*SmU | | S |
| WV- | TGCCACUGUAGAAAGGCAUGAT | 502 | T*SfG*mCfC*mAfC*mUfG*mUfA*mGfA*mAfA* | | SXOXOXOXOXOXOXSOOOOOXS |
| 7483 | U | | mG*SfGmCfAmUfGmA*T*SmU | | |
| WV- | TGCCACUGUAGAAAGGCAUGAT | 503 | T*SfG*mCfC*mAfC*mUfG*mUfA*mGfA*mAfA* | | SXOXOXOXOXOXOXOSOOOOXS |
| 7484 | U | | mGfG*SmCfAmUfGmA*T*SmU | | |
| WV- | TGCCACUGUAGAAAGGCAUGAT | 504 | T*SfG*mCfC*mAfC*mUfG*mUfA*mGfA*mAfA* | | SXOXOXOXOXOXOXOOSOOOXS |
| 7485 | U | | mGfGmC*SfAmUfGmA*T*SmU | | |
| WV- | TGCCACUGUAGAAAGGCAUGAT | 505 | T*SfG*mCfC*mAfC*mUfG*mUfA*mGfA*mAfA* | | SXOXOXOXOXOXOXOOOSOOXS |
| 7486 | U | | mGfGmCfA*SmUfGmA*T*SmU | | |
| WV- | TGCCACUGUAGAAAGGCAUGAT | 506 | T*SfG*mCfC*mAfC*mUfG*mUfA*mGfA*mAfA* | | SXOXOXOXOXOXOXOOOOSOXS |
| 7487 | U | | mGfGmCfAmU*SfGmA*T*SmU | | |
| WV- | TGCCACUGUAGAAAGGCAUGAT | 507 | T*SfG*mCfC*mAfC*mUfG*mUfA*mGfA*mAfA* | | SXOXOXOXOXOXOXOOOOOSXS |
| 7488 | U | | mGfGmCfAmUfG*SmA*T*SmU | | |
| WV- | TGCCACUGUAGAAAGGCAUGAT | 508 | T*SfG*mCfC*mAfC*mUfG*mUfA*mGfA*mAfA* | | SXOXOXOXOXOXOXOOOOOOS |
| 7489 | U | | mGfGmCfAmUfGmA*ST*SmU | | S |
| WV- | TGCCACUGUAGAAAGGCAUTU | 509 | T*SfG*SmCfC*SmAfC*SmUfG*SmUfA*SmGfA* | | SSOSOSOSOSOSOSOOOOSS |
| 7509 | | | SmAfA*SmGfGmCfAmU*ST*SmU | | |
| WV- | TGCCACUGUAGAAAGGCAUTU | 510 | T*SfG*SmCfC*SmAfC*SmUfG*SmUfA*SmGfA* | | SSOSOSOSOSOSOSOOSOSS |
| 7510 | | | SmAfA*SmGfGmC*SfAmU*ST*SmU | | |
| WV- | TGCCACUGUAGAAAGGCAUTU | 511 | T*SfG*SmCfC*SmA*SfC*SmU*SfG*SmU*SfA* | | SSOSSSSSSSOSOSOOSOSS |
| 7511 | | | SmGfA*SmAfA*SmGfGmC*SfAmU*ST*SmU | | |
| WV- | TGCCACUGUAGAAUGGCAUTU | 512 | T*fG*mCfC*mAfC*mUfG*mUfA*mGfA*mAfU* | | XXOXOXOXOXOXOXOOOOXX |
| 7545 | | | mGfGmCfAmU*T*mU | | |
| WV- | TGCCACUGUAGAAACGCAUTU | 513 | T*fG*mCfC*mAfC*mUfG*mUfA*mGfA*mAfA* | | XXOXOXOXOXOXOXOOOOXX |
| 7546 | | | mCfGmCfAmU*T*mU | | |
| WV- | TGCCACUGUAGAAAGCCAUTU | 514 | T*fG*mCfC*mAfC*mUfG*mUfA*mGfA*mAfA* | | XXOXOXOXOXOXOXOOOOXX |
| 7547 | | | mGfCmCfAmU*T*mU | | |
| WV- | TGCCACUGUAGAAAGGGAUTU | 515 | T*fG*mCfC*mAfC*mUfG*mUfA*mGfA*mAfA* | | XXOXOXOXOXOXOXOOOOXX |
| 7548 | | | mGfGmGfAmU*T*mU | | |
| WV- | TGCCACUGUAGAAAGGCUUTU | 516 | T*fG*mCfC*mAfC*mUfG*mUfA*mGfA*mAfA* | | XXOXOXOXOXOXOXOOOOXX |
| 7549 | | | mGfGmCfUmU*T*mU | | |
| WV- | TGCCACUGUAGAAAGGCAATU | 517 | T*fG*mCfC*mAfC*mUfG*mUfA*mGfA*mAfA* | | XXOXOXOXOXOXOXOOOOXX |
| 7550 | | | mGfGmCfAmA*T*mU | | |
| WV- | TGCCACUGUAGAAACGCAUGAT | 518 | T*fG*mCfC*mAfC*mUfG*mUfA*mGfA*mAfA* | | XXOXOXOXOXOXOXOOOOOOX |
| 7551 | U | | mCfGmCfAmUfGmA*T*mU | | X |
| WV- | TGCCACUGUAGAAAGCCAUGAT | 519 | T*fG*mCfC*mAfC*mUfG*mUfA*mGfA*mAfA* | | XXOXOXOXOXOXOXOOOOOOX |
| 7552 | U | | mGfCmCfAmUfGmA*T*mU | | X |
| WV- | TGCCACUGUAGAAAGGCUUGAT | 520 | T*fG*mCfC*mAfC*mUfG*mUfA*mGfA*mAfA* | | XXOXOXOXOXOXOXOOOOOOX |
| 7553 | U | | mGfGmCfUmUfGmA*T*mU | | X |
| WV- | TGCCACUGUAGAAAGGCAAGAT | 521 | T*fG*mCfC*mAfC*mUfG*mUfA*mGfA*mAfA* | | XXOXOXOXOXOXOXOOOOOOX |
| 7554 | U | | mGfGmCfAmAfGmA*T*mU | | X |
| WV- | TGCCACUGUAGAAAGGCAUCAT | 522 | T*fG*mCfC*mAfC*mUfG*mUfA*mGfA*mAfA* | | XXOXOXOXOXOXOXOOOOOOX |
| 7555 | U | | mGfGmCfAmUfCmA*T*mU | | X |
| WV- | TGCCACUGUAGAAAGGCAUGUT | 523 | T*fG*mCfC*mAfC*mUfG*mUfA*mGfA*mAfA* | | XXOXOXOXOXOXOXOOOOOOX |
| 7556 | U | | mGfGmCfAmUfGmU*T*mU | | X |
| WV- | UGUGCTTGGCTCCTGCCUGG | 524 | Mod001L001mU*mG*mU*mG*mC*T*T*G*G*C | | OXXXXXXXXXXXXXXXXXXX |
| 7576 | | | *T*C*C*T*G*mC*mC*mU*mG*mG | | |
| WV- | UCUUGTTACCCCCGCCAUGG | 525 | Mod001L001mU*mC*mU*mU*mG*T*T*A*C*C* | | OXXXXXXXXXXXXXXXXXXX |
| 7577 | | | C*C*m5C*G*C*mC*mA*mU*mG*mG | | |
| WV- | ACCCCCGCCATGGAGACGUU | 526 | Mod001L001mA*mC*mC*mC*mC*m5C*G*C*C* | | OXXXXXXXXXXXXXXXXXXX |
| 7578 | | | A*T*G*G*A*G*mA*mC*mG*mU*mU | | |
| WV- | UACCCCCGCCATGGAGACGU | 527 | Mod001L001mU*mA*mC*mC*mC*C*m5C*G*C* | | OXXXXXXXXXXXXXXXXXXX |
| 7579 | | | C*A*T*G*G*A*mG*mA*mC*mG*mU | | |
| WV- | CUGCACTGGGCTTCCUGGUG | 528 | Mod001L001mC*mU*mG*mC*mA*C*T*G*G*G | | OXXXXXXXXXXXXXXXXXXX |
| 7580 | | | *C*T*T*C*C*mU*mG*mG*mU*mG | | |
| WV- | UGGACCTGAGGATGGACCGC | 529 | Mod001L001mU*mG*mG*mA*mC*C*T*G*A*G | | OXXXXXXXXXXXXXXXXXXX |
| 7581 | | | *G*A*T*G*G*mA*mC*mC*mG*mC | | |
| WV- | AGGGACCCTCTGCACUGGGC | 530 | Mod001L001mA*mG*mG*mG*mA*C*C*C*T*C* | | OXXXXXXXXXXXXXXXXXXX |
| 7582 | | | T*G*C*A*C*mU*mG*mG*mG*mC | | |
| WV- | CUUGUTACCCCCGCCAUGGA | 531 | Mod001L001mC*mU*mU*mG*mU*T*A*C*C*C | | OXXXXXXXXXXXXXXXXXXX |
| 7583 | | | *C*m5C*G*C*C*mA*mU*mG*mG*mA | | |
| WV- | AGGCUGGGATCCTCCACGUC | 532 | Mod001L001mA*mG*mG*mC*mU*G*G*G*A*T | | OXXXXXXXXXXXXXXXXXXX |
| 7584 | | | *C*C*T*C*C*mA*mC*mG*mU*mC | | |
| WV- | AAGGGACCCTCTGCACUGGG | 533 | Mod001L001mA*mA*mG*mG*mG*A*C*C*C*T* | | OXXXXXXXXXXXXXXXXXXX |
| 7585 | | | C*T*G*C*A*mC*mU*mG*mG*mG | | |
| WV- | TGTGCTTGGCTCCTGCCTGG | 534 | Mod001L001Teo*Geo*Teo*Geo*m5Ceo*T*T*G* | | OXXXXXXXXXXXXXXXXXXX |
| 7586 | | | G*C*T*C*C*T*G*m5Ceo*m5Ceo*Teo*Geo* | | |
| | | | Geo | | |
| WV- | TCTTGTTACCCCCGCCATGG | 535 | Mod001L001Teo*m5Ceo*Teo*Teo*Geo*T*T*A*C | | OXXXXXXXXXXXXXXXXXXX |
| 7587 | | | *C*C*C*m5C*G*C*m5Ceo*Aeo*Teo*Geo*Geo | | |
| WV- | ACCCCCGCCATGGAGACGTT | 536 | Mod001L001Aeo*m5Ceo*m5Ceo*m5Ceo*m5Ceo* | | OXXXXXXXXXXXXXXXXXXX |
| 7588 | | | m5C*G*C*C*A*T*G*G*A*G*Aeo*m5Ceo* | | |
| | | | Geo*Teo*Teo | | |
| WV- | TACCCCCGCCATGGAGACGT | 537 | Mod001L001Teo*Aeo*m5Ceo*m5Ceo*m5Ceo*C* | | OXXXXXXXXXXXXXXXXXXX |
| 7589 | | | m5C*G*C*C*A*T*G*G*A*Geo*Aeo*m5Ceo* | | |
| | | | Geo*Teo | | |
| WV- | CTGCACTGGGCTTCCTGGTG | 538 | Mod001L001m5Ceo*Teo*Geo*m5Ceo*Aeo*C*T*G | OXXXXXXXXXXXXXXXXXXX | |
| 7590 | | | *G*G*C*T*T*C*C*Teo*Geo*Geo*Teo*Geo | | |
| WV- | TGGACCTGAGGATGGACCGC | 539 | Mod001L001Teo*Geo*Geo*Aeo*m5Ceo*C*T*G* | OXXXXXXXXXXXXXXXXXXX | |
| 7591 | | | A*G*G*A*T*G*G*Aeo*m5Ceo*m5Ceo*Geo* | | |
| | | | m5Ceo | | |
| WV- | AGGGACCCTCTGCACTGGGC | 540 | Mod001L001Aeo*Geo*Geo*Geo*Aeo*C*C*C*T* | OXXXXXXXXXXXXXXXXXXX | |
| 7592 | | | C*T*G*C*A*C*Teo*Geo*Geo*Geo*m5Ceo | | |
| WV- | CTTGTTACCCCCGCCATGGA | 541 | Mod001L001m5Ceo*Teo*Teo*Geo*Teo*T*A*C*C | OXXXXXXXXXXXXXXXXXXX | |
| 7593 | | | *C*C*m5C*G*C*C*Aeo*Teo*Geo*Geo*Aeo | | |
| WV- | AGGCTGGGATCCTCCACGTC | 542 | Mod001L001Aeo*Geo*Geo*m5Ceo*Teo*G*G*G* | OXXXXXXXXXXXXXXXXXXX | |
| 7594 | | | A*T*C*C*T*C*C*Aeo*m5Ceo*Geo*Teo* | | |
| | | | m5Ceo | | |
| WV- | AAGGGACCCTCTGCACTGGG | 543 | Mod001L001Aeo*Aeo*Geo*Geo*Geo*A*C*C*C* | OXXXXXXXXXXXXXXXXXXX | |
| 7595 | | | T*C*T*G*C*A*m5Ceo*Teo*Geo*Geo*Geo | | |
| WV- | UGUGCTTGGCTCCTGCCUGG | 544 | L001mU*mG*mU*mG*mC*T*T*G*G*C*T*C* | OXXXXXXXXXXXXXXXXXXX | |
| 7615 | | | C*T*G*mC*mC*mU*mG*mG | | |
| WV- | UCUUGTTACCCCCGCCAUGG | 545 | L001mU*mC*mU*mU*mG*T*T*A*C*C*C*C* | OXXXXXXXXXXXXXXXXXXX | |
| 7616 | | | m5C*G*C*mC*mA*mU*mG*mG | | |
| WV- | ACCCCCGCCATGGAGACGUU | 546 | L001mA*mC*mC*mC*mC*m5C*G*C*C*A*T*G | OXXXXXXXXXXXXXXXXXXX | |
| 7617 | | | *G*A*G*mA*mC*mG*mU*mU | | |
| WV- | UACCCCCGCCATGGAGACGU | 547 | L001mU*mA*mC*mC*mC*C*m5C*G*C*C*A*T | OXXXXXXXXXXXXXXXXXXX | |
| 7618 | | | *G*G*A*mG*mA*mC*mG*mU | | |

| WV- | CUGCACTGGGCTTCCUGGUG | 548 | L001mC*mU*mG*mC*mA*C*T*G*G*G*C*T* | OXXXXXXXXXXXXXXXXXXX |
|---|---|---|---|---|
| 7619 | | | T*C*C*mU*mG*mG*mU*mG | |
| WV- | UGGACCTGAGGATGGACCGC | 549 | L001mU*mG*mG*mA*mC*C*T*G*A*G*G*A* | OXXXXXXXXXXXXXXXXXXX |
| 7620 | | | T*G*G*mA*mC*mC*mG*mC | |
| WV- | AGGGACCCTCTGCACUGGGC | 550 | L001mA*mG*mG*mG*mA*C*C*C*T*C*T*G* | OXXXXXXXXXXXXXXXXXXX |
| 7621 | | | C*A*C*mU*mG*mG*mG*mC | |
| WV- | CUUGUTACCCCCGCCAUGGA | 551 | L001mC*mU*mU*mG*mU*T*A*C*C*C*C* | OXXXXXXXXXXXXXXXXXXX |
| 7622 | | | m5C*G*C*C*mA*mU*mG*mG*mA | |
| WV- | AGGCUGGGATCCTCCACGUC | 552 | L001mA*mG*mG*mC*mU*G*G*G*A*T*C*C* | OXXXXXXXXXXXXXXXXXXX |
| 7623 | | | T*C*C*mA*mC*mG*mU*mC | |
| WV- | AAGGGACCCTCTGCACUGGG | 553 | L001mA*mA*mG*mG*mG*A*C*C*C*T*C*T* | OXXXXXXXXXXXXXXXXXXX |
| 7624 | | | G*C*A*mC*mU*mG*mG*mG | |
| WV- | TGTGCTTGGCTCCTGCCTGG | 554 | L001Teo*Geo*Teo*Geo*m5Ceo*T*T*G*G*C*T | OXXXXXXXXXXXXXXXXXXX |
| 7625 | | | *C*C*T*G*m5Ceo*m5Ceo*Teo*Geo*Geo | |
| WV- | TCTTGTTACCCCCGCCATGG | 555 | L001Teo*m5Ceo*Teo*Teo*Geo*T*T*A*C*C*C* | OXXXXXXXXXXXXXXXXXXX |
| 7626 | | | C*m5C*G*C*m5Ceo*Aeo*Teo*Geo*Geo | |
| WV- | ACCCCCGCCATGGAGACGTT | 556 | L001Aeo*m5Ceo*m5Ceo*m5Ceo*m5Ceo*m5C*G* | OXXXXXXXXXXXXXXXXXXX |
| 7627 | | | C*C*A*T*G*G*A*G*Aeo*m5Ceo*Geo*Teo* | |
| | | | Teo | |
| WV- | TACCCCCGCCATGGAGACGT | 557 | L001Teo*Aeo*m5Ceo*m5Ceo*m5Ceo*C*m5C*G* | OXXXXXXXXXXXXXXXXXXX |
| 7628 | | | C*C*A*T*G*G*A*Geo*Aeo*m5Ceo*Geo*Teo | |
| WV- | CTGCACTGGGCTTCCTGGTG | 558 | L001m5Ceo*Teo*Geo*m5Ceo*Aeo*C*T*G*G*G | OXXXXXXXXXXXXXXXXXXX |
| 7629 | | | *C*T*T*C*C*Teo*Geo*Geo*Teo*Geo | |
| WV- | TGGACCTGAGGATGGACCGC | 559 | L001Teo*Geo*Geo*Aeo*m5Ceo*C*T*G*A*G*G | OXXXXXXXXXXXXXXXXXXX |
| 7630 | | | *A*T*G*G*Aeo*m5Ceo*m5Ceo*Geo*m5Ceo | |
| WV- | AGGGACCCTCTGCACTGGGC | 560 | L001Aeo*Geo*Geo*Geo*Aeo*C*C*C*T*C*T*G | OXXXXXXXXXXXXXXXXXXX |
| 7631 | | | *C*A*C*Teo*Geo*Geo*Geo*m5Ceo | |
| WV- | CTTGTTACCCCCGCCATGGA | 561 | L001m5Ceo*Teo*Teo*Geo*Teo*T*A*C*C*C*C | OXXXXXXXXXXXXXXXXXXX |
| 7632 | | | *m5C*G*C*C*Aeo*Teo*Geo*Geo*Aeo | |
| WV- | AGGCTGGGATCCTCCACGTC | 562 | L001Aeo*Geo*Geo*m5Ceo*Teo*G*G*G*A*T*C | OXXXXXXXXXXXXXXXXXXX |
| 7633 | | | *C*T*C*C*Aeo*m5Ceo*Geo*Teo*m5Ceo | |
| WV- | AAGGGACCCTCTGCACTGGG | 563 | L001Aeo*Aeo*Geo*Geo*Geo*A*C*C*C*T*C*T | OXXXXXXXXXXXXXXXXXXX |
| 7634 | | | *G*C*A*m5Ceo*Teo*Geo*Geo*Geo | |
| WV- | TGCCACUGUAGAAAGGCAUGAT | 564 | T*SfG*mCfC*mAfC*mUfG*mUfA*mGfA*mAfA* | SXOXOXOXOXOXOXOOOOOSXS |
| 7674 | U | | mGfGmCfAmUmG*SmA*T*SmU | |
| WV- | TGCCACUGUAGAAAGGCAUGAT | 565 | T*SfG*SmCfC*SmAfC*SmUfG*SmUfA*SmGfA* | SSOSOSOSOSOSOSOSOSOSOS |
| 7675 | U | | SmAfA*SmGfG*SmCfA*SmUfG*SmAT*SmU | |
| WV- | TGCCACUGUAGAAAGGCAUGAT | 566 | T*SfGmC*SfCmA*SfCmU*SfGmU*SfAmG*SfAmA* | SOSOSOSOSOSOSOSOSOSOSS |
| 7676 | U | | SfAmG*SfGmC*SfAmU*SfGmA*ST*SmU | |
| WV- | TGCCACUGUAGAAAGGCATTU | 567 | T*fG*mCfC*mAfC*mUfG*mUfA*mGfA*mAfA* | XXOXOXOXOXOXOXOOOOXX |
| 7776 | | | GeoGeom5CeoAeoTeo*T*mU | |
| WV- | TGCCACUGUAGAAAGGCATGAT | 568 | T*fG*mCfC*mAfC*mUfG*mUfA*mGfA*mAfA* | XXOXOXOXOXOXOXOOOOOOX |
| 7777 | U | | GeoGeom5CeoAeoTeoGeoAeo*T*mU | X |
| WV- | CAUGAAGCAGGAACAUACCA | 569 | mC*mAmUmGmA*A*G*C*A*G*G*A*A*C*A* | XOOOXXXXXXXXXXXOOOX |
| 7778 | | | mUmAmCmC*mA | |
| WV- | GCAUGAAGCAGGAACAUACC | 570 | mG*mCmAmUmG*A*A*G*C*A*G*G*A*A*C* | XOOOXXXXXXXXXXXOOOX |
| 7779 | | | mAmUmAmC*mC | |
| WV- | GGCAUGAAGCAGGAACAUAC | 571 | mG*mGmCmAmU*G*A*A*G*C*A*G*G*A*A* | XOOOXXXXXXXXXXXOOOX |
| 7780 | | | mCmAmUmA*mC | |
| WV- | AGGCATGAAGCAGGAACAUA | 572 | mA*mGmGmCmA*T*G*A*A*G*C*A*G*G*A* | XOOOXXXXXXXXXXXOOOX |
| 7781 | | | mAmCmAmU*mA | |
| WV- | AAGGCATGAAGCAGGAACAU | 573 | mA*mAmGmGmC*A*T*G*A*A*G*C*A*G*G* | XOOOXXXXXXXXXXXOOOX |
| 7782 | | | mAmAmCmA*mU | |
| WV- | AAAGGCATGAAGCAGGAACA | 574 | mA*mAmAmGmG*C*A*T*G*A*A*G*C*A*G* | XOOOXXXXXXXXXXXOOOX |
| 7783 | | | mGmAmAmC*mA | |
| WV- | GAAAGGCATGAAGCAGGAAC | 575 | mG*mAmAmAmG*G*C*A*T*G*A*A*G*C*A* | XOOOXXXXXXXXXXXOOOX |
| 7784 | | | mGmGmAmA*mC | |
| WV- | AGAAAGGCATGAAGCAGGAA | 576 | mA*mGmAmAmA*G*G*C*A*T*G*A*A*G*C* | XOOOXXXXXXXXXXXOOOX |
| 7785 | | | mAmGmGmA*mA | |
| WV- | GCCACTGTAGAAAGGCAUGA | 577 | mG*mCmCmAmC*T*G*T*A*G*A*A*A*G*G* | XOOOXXXXXXXXXXXOOOX |
| 7786 | | | mCmAmUmG*mA | |
| WV- | GGCCACTGTAGAAAGGCAUG | 578 | mG*mGmCmCmA*C*T*G*T*A*G*A*A*A*G* | XOOOXXXXXXXXXXXOOOX |
| 7787 | | | mGmCmAmU*mG | |
| WV- | AGGCCACTGTAGAAAGGCAU | 579 | mA*mGmGmCmC*A*C*T*G*T*A*G*A*A*A* | XOOOXXXXXXXXXXXOOOX |
| 7788 | | | mGmGmCmA*mU | |
| WV- | AAGGCCACTGTAGAAAGGCA | 580 | mA*mAmGmGmC*C*A*C*T*G*T*A*G*A*A* | XOOOXXXXXXXXXXXOOOX |
| 7789 | | | mAmGmGmC*mA | |
| WV- | UAAGGCCACTGTAGAAAGGC | 581 | mU*mAmAmGmG*C*C*A*C*T*G*T*A*G*A* | XOOOXXXXXXXXXXXOOOX |
| 7790 | | | mAmAmGmG*mC | |
| WV- | AUAAGGCCACTGTAGAAAGG | 582 | mA*mUmAmAmG*G*C*C*A*C*T*G*T*A*G* | XOOOXXXXXXXXXXXOOOX |
| 7791 | | | mAmAmAmG*mG | |
| WV- | GAUAAGGCCACTGTAGAAAG | 583 | mG*mAmUmAmA*G*G*C*C*A*C*T*G*T*A* | XOOOXXXXXXXXXXXOOOX |
| 7792 | | | mGmAmAmA*mG | |
| WV- | GGAUAAGGCCACTGTAGAAA | 584 | mG*mGmAmUmA*A*G*G*C*C*A*C*T*G*T* | XOOOXXXXXXXXXXXOOOX |
| 7793 | | | mAmGmAmA*mA | |
| WV- | CATGAAGCAGGAACATACCA | 585 | m5Ceo*AeoTeoGeoAeo*A*G*C*A*G*G*A*A*C | XOOOXXXXXXXXXXXOOOX |
| 7794 | | | *A*TeoAeom5Ceom5Ceo*Aeo | |
| WV- | GCATGAAGCAGGAACATACC | 586 | Geo*m5CeoAeoTeoGeo*A*A*G*C*A*G*G*A*A | XOOOXXXXXXXXXXXOOOX |
| 7795 | | | *C*AeoTeoAeom5Ceo*m5Ceo | |
| WV- | GGCATGAAGCAGGAACATAC | 587 | Geo*Geom5CeoAeoTeo*G*A*A*G*C*A*G*G*A | XOOOXXXXXXXXXXXOOOX |
| 7796 | | | *A*m5CeoAeoTeoAeo*m5Ceo | |
| WV- | AGGCATGAAGCAGGAACATA | 588 | Aeo*GeoGeom5CeoAeo*T*G*A*A*G*C*A*G*G | XOOOXXXXXXXXXXXOOOX |
| 7797 | | | *A*Aeom5CeoAeoTeo*Aeo | |
| WV- | AAGGCATGAAGCAGGAACAT | 589 | Aeo*AeoGeoGeom5Ceo*A*T*G*A*A*G*C*A*G | XOOOXXXXXXXXXXXOOOX |
| 7798 | | | *G*AeoAeom5CeoAeo*Teo | |
| WV- | AAAGGCATGAAGCAGGAACA | 590 | Aeo*AeoAeoGeoGeo*C*A*T*G*A*A*G*C*A*G | XOOOXXXXXXXXXXXOOOX |
| 7799 | | | *GeoAeoAeom5Ceo*Aeo | |
| WV- | GAAAGGCATGAAGCAGGAAC | 591 | Geo*AeoAeoAeoGeo*G*C*A*T*G*A*A*G*C*A | XOOOXXXXXXXXXXXOOOX |
| 7800 | | | *GeoGeoAeoAeo*m5Ceo | |
| WV- | AGAAAGGCATGAAGCAGGAA | 592 | Aeo*GeoAeoAeoAeo*G*G*C*A*T*G*A*A*G*C | XOOOXXXXXXXXXXXOOOX |
| 7801 | | | *AeoGeoGeoAeo*Aeo | |
| WV- | TAGAAAGGCATGAAGCAGGA | 593 | Teo*AeoGeoAeoAeo*A*G*G*C*A*T*G*A*A*G | XOOOXXXXXXXXXXXOOOX |
| 7802 | | | *m5CeoAeoGeoGeo*Aeo | |
| WV- | GTAGAAAGGCATGAAGCAGG | 594 | Geo*TeoAeoGeoAeo*A*A*G*G*C*A*T*G*A*A | XOOOXXXXXXXXXXXOOOX |
| 7803 | | | *Geom5CeoAeoGeo*Geo | |
| WV- | TGTAGAAAGGCATGAAGCAG | 595 | Teo*GeoTeoAeoGeo*A*A*A*G*G*C*A*T*G*A | XOOOXXXXXXXXXXXOOOX |
| 7804 | | | *AeoGeom5CeoAeo*Geo | |
| WV- | CTGTAGAAAGGCATGAAGCA | 596 | m5Ceo*TeoGeoTeoAeo*G*A*A*A*G*G*C*A*T | XOOOXXXXXXXXXXXOOOX |
| 7805 | | | *G*AeoAeoGeom5Ceo*Aeo | |
| WV- | ACTGTAGAAAGGCATGAAGC | 597 | Aeo*m5CeoTeoGeoTeo*A*G*A*A*A*G*G*C*A | XOOOXXXXXXXXXXXOOOX |
| 7806 | | | *T*GeoAeoAeoGeo*m5Ceo | |
| WV- | CACTGTAGAAAGGCATGAAG | 598 | m5Ceo*Aeom5CeoTeoGeo*T*A*G*A*A*A*G*G | XOOOXXXXXXXXXXXOOOX |
| 7807 | | | *C*A*TeoGeoAeoAeo*Geo | |
| WV- | CCACTGTAGAAAGGCATGAA | 599 | m5Ceo*m5CeoAeom5CeoTeo*G*T*A*G*A*A*A* | XOOOXXXXXXXXXXXOOOX |
| 7808 | | | G*G*C*AeoTeoGeoAeo*Aeo | |
| WV- | GCCACTGTAGAAAGGCATGA | 600 | Geo*m5Ceom5CeoAeom5Ceo*T*G*T*A*G*A*A* | XOOOXXXXXXXXXXXOOOX |
| 7809 | | | A*G*G*m5CeoAeoTeoGeo*Aeo | |
| WV- | GGCCACTGTAGAAAGGCATG | 601 | Geo*Geom5Ceom5CeoAeo*C*T*G*T*A*G*A*A | XOOOXXXXXXXXXXXOOOX |
| 7810 | | | *A*G*Geom5CeoAeoTeo*Geo | |
| WV- | AGGCCACTGTAGAAAGGCAT | 602 | Aeo*GeoGeom5Ceom5Ceo*A*C*T*G*T*A*G*A | XOOOXXXXXXXXXXXOOOX |
| 7811 | | | *A*A*GeoGeom5CeoAeo*Teo | |
| WV- | AAGGCCACTGTAGAAAGGCA | 603 | Aeo*AeoGeoGeom5Ceo*C*A*C*T*G*T*A*G*A | XOOOXXXXXXXXXXXOOOX |
| 7812 | | | *A*AeoGeoGeom5Ceo*Aeo | |
| WV- | TAAGGCCACTGTAGAAAGGC | 604 | Teo*AeoAeoGeoGeo*C*C*A*C*T*G*T*A*G*A | XOOOXXXXXXXXXXXOOOX |
| 7813 | | | *AeoAeoGeoGeo*m5Ceo | |
| WV- | ATAAGGCCACTGTAGAAAGG | 605 | Aeo*TeoAeoAeoGeo*G*C*C*A*C*T*G*T*A*G | XOOOXXXXXXXXXXXOOOX |
| 7814 | | | *AeoAeoAeoGeo*Geo | |
| WV- | GATAAGGCCACTGTAGAAAG | 606 | Geo*AeoTeoAeoAeo*G*G*C*C*A*C*T*G*T*A | XOOOXXXXXXXXXXXOOOX |
| 7815 | | | *GeoAeoAeoAeo*Geo | |
| WV- | GGATAAGGCCACTGTAGAAA | 607 | Geo*GeoAeoTeoAeo*A*G*G*C*C*A*C*T*G*T | XOOOXXXXXXXXXXXOOOX |
| 7816 | | | *AeoGeoAeoAeo*Aeo | |
| WV- | CAUGAAGCAGGAACAUACCA | 608 | m5IC*mAmUmGmA*A*G*C*A*G*G*A*A*C*A | XOOOXXXXXXXXXXXOOOX |
| 7817 | | | *mUmAmCmC*IA | |
| WV- | GCAUGAAGCAGGAACAUACC | 609 | IG*mCmAmUmG*A*A*G*C*A*G*G*A*A*C* | XOOOXXXXXXXXXXXOOOX |
| 7818 | | | mAmUmAmC*m5IC | |
| WV- | GGCAUGAAGCAGGAACAUAC | 610 | IG*mGmCmAmU*G*A*A*G*C*A*G*G*A*A* | XOOOXXXXXXXXXXXOOOX |
| 7819 | | | mCmAmUmA*m5IC | |
| WV- | AGGCATGAAGCAGGAACAUA | 611 | IA*mGmGmCmA*T*G*A*A*G*C*A*G*G*A* | XOOOXXXXXXXXXXXOOOX |
| 7820 | | | mAmCmAmU*IA | |
| WV- | AAGGCATGAAGCAGGAACAT | 612 | IA*mAmGmGmC*A*T*G*A*A*G*C*A*G*G* | XOOOXXXXXXXXXXXOOOX |
| 7821 | | | mAmAmCmA*IT | |
| WV- | AAAGGCATGAAGCAGGAACA | 613 | IA*mAmAmGmG*C*A*T*G*A*A*G*C*A*G* | XOOOXXXXXXXXXXXOOOX |
| 7822 | | | mGmAmAmC*IA | |
| WV- | GAAAGGCATGAAGCAGGAAC | 614 | IG*mAmAmAmG*G*C*A*T*G*A*A*G*C*A* | XOOOXXXXXXXXXXXOOOX |
| 7823 | | | mGmGmAmA*m5IC | |
| WV- | AGAAAGGCATGAAGCAGGAA | 615 | IA*mGmAmAmA*G*G*C*A*T*G*A*A*G*C* | XOOOXXXXXXXXXXXOOOX |
| 7824 | | | mAmGmGmA*IA | |
| WV- | TAGAAAGGCATGAAGCAGGA | 616 | IT*mAmGmAmA*A*G*G*C*A*T*G*A*A*G* | XOOOXXXXXXXXXXXOOOX |
| 7825 | | | mCmAmGmG*IA | |
| WV- | GUAGAAAGGCATGAAGCAGG | 617 | IG*mUmAmGmA*A*A*G*G*C*A*T*G*A*A* | XOOOXXXXXXXXXXXOOOX |
| 7826 | | | mGmCmAmG*IG | |
| WV- | TGUAGAAAGGCATGAAGCAG | 618 | IT*mGmUmAmG*A*A*A*G*G*C*A*T*G*A* | XOOOXXXXXXXXXXXOOOX |
| 7827 | | | mAmGmCmA*IG | |
| WV- | CUGUAGAAAGGCATGAAGCA | 619 | m5IC*mUmGmUmA*G*A*A*A*G*G*C*A*T*G | XOOOXXXXXXXXXXXOOOX |
| 7828 | | | *mAmAmGmC*IA | |
| WV- | ACUGUAGAAAGGCATGAAGC | 620 | IA*mCmUmGmU*A*G*A*A*A*G*G*C*A*T* | XOOOXXXXXXXXXXXOOOX |
| 7829 | | | mGmAmAmG*m5IC | |
| WV- | CACUGTAGAAAGGCAUGAAG | 621 | m5IC*mAmCmUmG*T*A*G*A*A*A*G*G*C*A | XOOOXXXXXXXXXXXOOOX |
| 7830 | | | *mUmGmAmA*IG | |
| WV- | CCACUGTAGAAAGGCAUGAA | 622 | m5IC*mCmAmCmU*G*T*A*G*A*A*A*G*G*C | XOOOXXXXXXXXXXXOOOX |
| 7831 | | | *mAmUmGmA*IA | |
| WV- | GCCACTGTAGAAAGGCAUGA | 623 | IG*mCmCmAmC*T*G*T*A*G*A*A*A*G*G* | XOOOXXXXXXXXXXXOOOX |
| 7832 | | | mCmAmUmG*IA | |
| WV- | GGCCACTGTAGAAAGGCAUG | 624 | IG*mGmCmCmA*C*T*G*T*A*G*A*A*A*G* | XOOOXXXXXXXXXXXOOOX |
| 7833 | | | mGmCmAmU*IG | |
| WV- | AGGCCACTGTAGAAAGGCAT | 625 | IA*mGmGmCmC*A*C*T*G*T*A*G*A*A*A* | XOOOXXXXXXXXXXXOOOX |
| 7834 | | | mGmGmCmA*IT | |
| WV- | AAGGCCACTGTAGAAAGGCA | 626 | IA*mAmGmGmC*C*A*C*T*G*T*A*G*A*A* | XOOOXXXXXXXXXXXOOOX |
| 7835 | | | mAmGmGmC*IA | |
| WV- | TAAGGCCACTGTAGAAAGGC | 627 | IT*mAmAmGmG*C*C*A*C*T*G*T*A*G*A* | XOOOXXXXXXXXXXXOOOX |
| 7836 | | | mAmAmGmG*m5IC | |
| WV- | AUAAGGCCACTGTAGAAAGG | 628 | IA*mUmAmAmG*G*C*C*A*C*T*G*T*A*G* | XOOOXXXXXXXXXXXOOOX |
| 7837 | | | mAmAmAmG*IG | |
| WV- | GAUAAGGCCACTGTAGAAAG | 629 | IG*mAmUmAmA*G*G*C*C*A*C*T*G*T*A* | XOOOXXXXXXXXXXXOOOX |
| 7838 | | | mGmAmAmA*IG | |
| WV- | GGAUAAGGCCACTGTAGAAA | 630 | IG*mGmAmUmA*A*G*G*C*C*A*C*T*G*T* | XOOOXXXXXXXXXXXOOOX |
| 7839 | | | mAmGmAmA*IA | |
| WV- | CATGAAGCAGGAACATACCA | 631 | m5IC*AeoTeoGeoAeo*A*G*C*A*G*G*A*A*C* | XOOOXXXXXXXXXXXOOOX |
| 7840 | | | A*TeoAeom5Ceom5Ceo*IA | |
| WV- | GCATGAAGCAGGAACATACC | 632 | IG*m5CeoAeoTeoGeo*A*A*G*C*A*G*G*A*A* | XOOOXXXXXXXXXXXOOOX |
| 7841 | | | C*AeoTeoAeom5Ceo*m5IC | |
| WV- | GGCATGAAGCAGGAACATAC | 633 | IG*Geom5CeoAeoTeo*G*A*A*G*C*A*G*G*A* | XOOOXXXXXXXXXXXOOOX |
| 7842 | | | A*m5CeoAeoTeoAeo*m5IC | |
| WV- | AGGCATGAAGCAGGAACATA | 634 | IA*GeoGeom5CeoAeo*T*G*A*A*G*C*A*G*G* | XOOOXXXXXXXXXXXOOOX |
| 7843 | | | A*Aeom5CeoAeoTeo*IA | |
| WV- | AAGGCATGAAGCAGGAACAT | 635 | IA*AeoGeoGeom5Ceo*A*T*G*A*A*G*C*A*G* | XOOOXXXXXXXXXXXOOOX |
| 7844 | | | G*AeoAeom5CeoAeo*IT | |
| WV- | AAAGGCATGAAGCAGGAACA | 636 | IA*AeoAeoGeoGeo*C*A*T*G*A*A*G*C*A*G* | XOOOXXXXXXXXXXXOOOX |
| 7845 | | | GeoAeoAeom5Ceo*IA | |
| WV- | GAAAGGCATGAAGCAGGAAC | 637 | IG*AeoAeoAeoGeo*G*C*A*T*G*A*A*G*C*A* | XOOOXXXXXXXXXXXOOOX |
| 7846 | | | GeoGeoAeoAeo*m5IC | |
| WV- | AGAAAGGCATGAAGCAGGAA | 638 | IA*GeoAeoAeoAeo*G*G*C*A*T*G*A*A*G*C* | XOOOXXXXXXXXXXXOOOX |
| 7847 | | | AeoGeoGeoAeo*IA | |
| WV- | TAGAAAGGCATGAAGCAGGA | 639 | IT*AeoGeoAeoAeo*A*G*G*C*A*T*G*A*A*G* | XOOOXXXXXXXXXXXOOOX |
| 7848 | | | m5CeoAeoGeoGeo*IA | |
| WV- | GTAGAAAGGCATGAAGCAGG | 640 | IG*TeoAeoGeoAeo*A*A*G*G*C*A*T*G*A*A* | XOOOXXXXXXXXXXXOOOX |
| 7849 | | | Geom5CeoAeoGeo*IG | |
| WV- | TGTAGAAAGGCATGAAGCAG | 641 | IT*GeoTeoAeoGeo*A*A*A*G*G*C*A*T*G*A* | XOOOXXXXXXXXXXXOOOX |
| 7850 | | | AeoGeom5CeoAeo*IG | |
| WV- | CTGTAGAAAGGCATGAAGCA | 642 | m5IC*TeoGeoTeoAeo*G*A*A*A*G*G*C*A*T* | XOOOXXXXXXXXXXXOOOX |
| 7851 | | | G*AeoAeoGeom5Ceo*IA | |
| WV- | ACTGTAGAAAGGCATGAAGC | 643 | IA*m5CeoTeoGeoTeo*A*G*A*A*A*G*G*C*A* | XOOOXXXXXXXXXXXOOOX |
| 7852 | | | T*GeoAeoAeoGeo*m5IC | |
| WV- | CACTGTAGAAAGGCATGAAG | 644 | m5IC*Aeom5CeoTeoGeo*T*A*G*A*A*A*G*G* | XOOOXXXXXXXXXXXOOOX |
| 7853 | | | C*A*TeoGeoAeoAeo*IG | |
| WV- | CCACTGTAGAAAGGCATGAA | 645 | m5IC*m5CeoAeom5CeoTeo*G*T*A*G*A*A*A*G | XOOOXXXXXXXXXXXOOOX |
| 7854 | | | *G*C*AeoTeoGeoAeo*IA | |
| WV- | GCCACTGTAGAAAGGCATGA | 646 | IG*m5Ceom5CeoAeom5Ceo*T*G*T*A*G*A*A*A | XOOOXXXXXXXXXXXOOOX |
| 7855 | | | *G*G*m5CeoAeoTeoGeo*IA | |
| WV- | GGCCACTGTAGAAAGGCATG | 647 | IG*Geom5Ceom5CeoAeo*C*T*G*T*A*G*A*A* | XOOOXXXXXXXXXXXOOOX |
| 7856 | | | A*G*Geom5CeoAeoTeo*IG | |
| WV- | AGGCCACTGTAGAAAGGCAT | 648 | IA*GeoGeom5Ceom5Ceo*A*C*T*G*T*A*G*A* | XOOOXXXXXXXXXXXOOOX |
| 7857 | | | A*A*GeoGeom5CeoAeo*IT | |
| WV- | AAGGCCACTGTAGAAAGGCA | 649 | IA*AeoGeoGeom5Ceo*C*A*C*T*G*T*A*G*A* | XOOOXXXXXXXXXXXOOOX |
| 7858 | | | A*AeoGeoGeom5Ceo*IA | |
| WV- | TAAGGCCACTGTAGAAAGGC | 650 | IT*AeoAeoGeoGeo*C*C*A*C*T*G*T*A*G*A* | XOOOXXXXXXXXXXXOOOX |
| 7859 | | | AeoAeoGeoGeo*m5IC | |
| WV- | ATAAGGCCACTGTAGAAAGG | 651 | IA*TeoAeoAeoGeo*G*C*C*A*C*T*G*T*A*G* | XOOOXXXXXXXXXXXOOOX |
| 7860 | | | AeoAeoAeoGeo*IG | |
| WV- | GATAAGGCCACTGTAGAAAG | 652 | IG*AeoTeoAeoAeo*G*G*C*C*A*C*T*G*T*A* | XOOOXXXXXXXXXXXOOOX |
| 7861 | | | GeoAeoAeoAeo*IG | |
| WV- | GGATAAGGCCACTGTAGAAA | 653 | IG*GeoAeoTeoAeo*A*G*G*C*C*A*C*T*G*T* | XOOOXXXXXXXXXXXOOOX |
| 7862 | | | AeoGeoAeoAeo*IA | |
| WV- | GGACCTGAGGATGGACCGCG | 654 | Mod001L001mG*SmG*SmA*SmC*SmC*ST*SG*RA* | OSSSSSSRSSRSSRSSSSSS |
| 8030 | | | SG*SG*RA*ST*SG*RG*SA*SmC*SmC*SmG*SmC* | |
| | | | SmG | |
| WV- | GGACCTGAGGATGGACCGCG | 655 | Mod001L001mG*SmGmAm5CeomC*ST*SG*RA*SG*SG | OSOOOSSRSSRSSRSSOOSS |
| 8031 | | | *RA*ST*SG*RG*SA*Sm5Ceom5CeomG*SmC*SmG | |
| WV- | TGCCACUGUAGAAAGGCAUG | 656 | VPT*SfG*SmCfC*SmAfC*SmUfG*SmUfA*SmGfA* | SSOSOSOSOSOSOSSSSSSSSS |
| 8032 | ATU | | SmAfA*SmG*SfG*SmC*SfA*SmU*SfG*SmA* | |
| | | | STGaNC6T*SmU | |
| WV- | GGACCTGAGGATGGACCGCG | 657 | Mod001L001mG*SmGmAm5CeomC*ST*SG*RA*SG*SG | OSOOOSSRSSRSSRSSOOOS |
| 8033 | | | *RA*ST*SG*RG*SA*Sm5Ceom5CeomGmC*SmG | |
| WV- | GGACCTGAGGATGGACCGCG | 658 | Mod001L001Geo*SGeo*SAeo*Sm5Ceo*Sm5Ceo*ST*SG | OSSSSSSRSSRSSRSSSSSS |
| 8034 | | | *RA*SG*SG*RA*ST*SG*RG*SA*Sm5Ceo*Sm5Ceo* | |
| | | | SGeo*Sm5Ceo*SGeo | |
| WV- | GGACCTGAGGATGGACCGCG | 659 | Mod001L001Geo*RGeo*RAeo*Rm5Ceo*Rm5Ceo*RT* | ORRRRRSRSSRSSRSSRRRR |
| 8035 | | | SG*RA*SG*SG*RA*ST*SG*RG*SA*Sm5Ceo* | |
| | | | Rm5Ceo*RGeo*Rm5Ceo*RGeo | |
| WV- | GGACCTGAGGATGGACCGCG | 660 | Mod001L001Geo*SGeoAeom5Ceom5Ceo*ST*SG*RA*SG | OSOOOSSRSSRSSRSSOOOS |
| 8036 | | | *SG*RA*ST*SG*RG*SA*Sm5Ceom5CeoGeom5Ceo* | |
| | | | SGeo | |
| WV- | GGACCTGAGGATGGACCGCG | 661 | Mod001L001Geo*SGeoAeom5Ceom5Ceo*RT*SG*RA*SG | OSOOORSRSSRSSRSSOOOS |
| 8037 | | | *SG*RA*ST*SG*RG*SA*Sm5Ceom5CeoGeom5Ceo* | |
| | | | SGeo | |
| WV- | GGACCTGAGGATGGACCGCG | 662 | Mod001L001Geo*RGeoAeom5Ceom5Ceo*ST*SG*RA*SG | OROOOSSRSSRSSRSSOOOR |
| 8038 | | | *SG*RA*ST*SG*RG*SA*Sm5Ceom5CeoGeom5Ceo* | |
| | | | RGeo | |
| WV- | GGACCTGAGGATGGACCGCG | 663 | Mod001L001Geo*RGeoAeom5Ceom5Ceo*RT*SG*RA* | OROOORSRSSRSSRSSOOOR |
| 8039 | | | SG*SG*RA*ST*SG*RG*SA*Sm5Ceom5CeoGeom5Ceo | |
| | | | *RGeo | |
| WV- | GGACCTGAGGATGGACCGCG | 664 | Mod001L001mG*RmG*RmA*RmC*RmC*RT*SG*RA* | ORRRRRSRSSRSSRSSRRRR |
| 8040 | | | SG*SG*RA*ST*SG*RG*SA*SmC*RmC*RmG*RmC* | |
| | | | RmG | |
| WV- | GGACCTGAGGATGGACCGCG | 665 | Mod001L001mG*SmG*RmA*RmC*RmC*RT*SG*RA* | OSRRRRSRSSRSSRSSRRRS |
| 8041 | | | SG*SG*RA*ST*SG*RG*SA*SmC*RmC*RmG*RmC* | |
| | | | SmG | |
| WV- | GGACCTGAGGATGGACCGCG | 666 | Mod001L001mG*SmGmAmCmC*ST*SG*RA*SG*SG* | OSOOOSSRSSRSSRSSOOOS |
| 8042 | | | RA*ST*SG*RG*SA*SmCmCmGmC*SmG | |
| WV- | GGACCTGAGGATGGACCGCG | 667 | Mod001L001mG*SmG*SmA*SmC*SmC*ST*SG*RA* | OSSSSSSRSSRSSRSSSSSS |
| 8043 | | | SG*SG*RA*ST*SG*RG*SA*Sm5Ceo*Sm5Ceo*SGeo* | |
| | | | Sm5Ceo*SGeo | |
| WV- | GGACCTGAGGATGGACCGCG | 668 | Mod001L001mG*SmG*SmA*SmC*SmC*ST*SG*RA* | OSSSSSSRSSRSSRSSRRRR |
| 8044 | | | SG*SG*RA*ST*SG*RG*SA*Sm5Ceo*Rm5Ceo*RGeo | |
| | | | *Rm5Ceo*RGeo | |
| WV- | GGACCTGAGGATGGACCGCG | 669 | Mod001L001mG*SmG*SmA*SmC*SmC*ST*SG*RA* | OSSSSSSRSSRSSRSSOOOS |
| 8045 | | | SG*SG*RA*ST*SG*RG*SA*Sm5Ceom5CeoGeom5Ceo | |
| | | | *SGeo | |
| WV- | GGACCTGAGGATGGACCGCG | 670 | Mod001L001mG*SmG*SmA*SmC*SmC*ST*SG*RA* | OSSSSSSRSSRSSRSSOOOS |
| 8046 | | | SG*SG*RA*ST*SG*RG*SA*Sm5Ceom5CeoGeom5Ceo | |
| | | | *SGeo | |
| WV- | GGACCTGAGGATGGACCGCG | 671 | Mod001L001mG*SmG*SmA*SmC*SmC*ST*SG*RA* | OSSSSSSRSSRSSRSSOOOR |
| 8047 | | | SG*SG*RA*ST*SG*RG*SA*Sm5Ceom5CeoGeom5Ceo | |
| | | | *RGeo | |
| WV- | GGACCTGAGGATGGACCGCG | 672 | Mod001L001mG*SmG*SmA*SmC*SmC*ST*SG*RA* | OSSSSSSRSSRSSRSSOOOR |
| 8048 | | | SG*SG*RA*ST*SG*RG*SA*Sm5Ceom5CeoGeom5Ceo | |
| | | | *RGeo | |
| WV- | TGCCACUGUAGAAAGGCAUG | 673 | VPT*SfG*SmCfC*SmAfC*SmU*SfG*SmU*SfA*SmGfA | SSOSOSSSSSOSOSSSSSSSSS |
| 8049 | ATU | | *SmAfA*SmG*SfG*SmC*SfA*SmU*SfG*SmA* | |
| | | | STGaNC6T*SmU | |
| WV- | TGCCACUGUAGAAAGGCATG | 674 | VPT*SfG*SmCfC*SmAfC*SmUfG*SmUfA*SmGfA* | SSOSOSOSOSOSOSOOOOOO |
| 8050 | ATU | | SmAfA*SGeoGeom5CeoAeoTeoGeoAeoTGaNC6T*SmU | OS |
| WV- | TGCCACUGUAGAAAGGCATG | 675 | VPT*SfG*SmCfC*SmAfC*SmUfG*SmUfA*SmGfA* | SSOSOSOSOSOSOSSSSSSSSS |
| 8051 | ATU | | SmAfA*SGeo*SGeo*Sm5Ceo*SAeo*STeo*SGeo*SAeo | |
| | | | *STGaNC6T*SmU | |
| WV- | TGCCACUGUAGAAAGGCATG | 676 | VPT*SfG*SmCfC*SmAfC*SmUfG*SmUfA*SmGfA* | SSOSOSOSOSOSOSRRRRRRRS |
| 8052 | ATU | | SmAfA*SGeo*RGeo*Rm5Ceo*RAeo*RTeo*RGeo* | |
| | | | RAeo*RTGaNC6T*SmU | |
| WV- | TGCCACUGUAGAAAGGCATG | 677 | VPT*SfG*SmCfC*SmAfC*SmUfG*SmUfA*SmGfA* | SSOSOSOSOSOSOSSSSSSSSS |
| 8053 | ATU | | SmAfA*SG*SG*SC*SA*ST*SG*SA*STGaNC6T*SmU | |
| WV- | TGCCACUGUAGAAAGGCAUG | 678 | VPT*SfG*SmCfC*SmAfC*SmUfG*SmUfA*SmGfA* | SSOSOSOSOSOSOSSSSSSSSS |
| 8054 | ATU | | SmAfA*SG*SG*SC*SmA*SmU*SG*SA*STGaNC6T* | |
| | | | SmU | |
| WV- | TGCCACUGUAGAAAGGCAUG | 679 | T*SfG*SmCfC*SmAfC*SmU*SfG*SmU*SfA*SmGfA* | SSOSOSSSSSOSOSSSSSSSSS |
| 8055 | ATU | | SmAfA*SmG*SfG*SmC*SfA*SmU*SfG*SmA* | |
| | | | STGaNC6T*SmU | |
| WV- | TGCCACUGUAGAAAGGCATG | 680 | T*SfG*SmCfC*SmAfC*SmUfG*SmUfA*SmGfA*SmAfA | SSOSOSOSOSOSOSOOOOOO |
| 8056 | ATU | | *SGeoGeom5CeoAeoTeoGeoAeoTGaNC6T*SmU | OS |
| WV- | TGCCACUGUAGAAAGGCATG | 681 | T*SfG*SmCfC*SmAfC*SmUfG*SmUfA*SmGfA*SmAfA | SSOSOSOSOSOSOSSSSSSSSS |
| 8057 | ATU | | *SGeo*SGeo*Sm5Ceo*SAeo*STeo*SGeo*SAeo* | |
| | | | STGaNC6T*SmU | |
| WV- | TGCCACUGUAGAAAGGCATG | 682 | T*SfG*SmCfC*SmAfC*SmUfG*SmUfA*SmGfA*SmAfA | SSOSOSOSOSOSOSRRRRRRRS |
| 8058 | ATU | | *SGeo*RGeo*Rm5Ceo*RAeo*RTeo*RGeo*RAeo* | |
| WV- | TGCCACUGUAGAAAGGCATG | 683 | RTGaNC6T*SmU | SSOSOSOSOSOSOSSSSSSSSS |
| 8059 | ATU | | *SG*SG*SC*SA*ST*SG*SA*STGaNC6T*SmU | |
| WV- | TGCCACUGUAGAAAGGCAUG | 684 | T*SfG*SmCfC*SmAfC*SmUfG*SmUfA*SmGfA*SmAfA | SSOSOSOSOSOSOSSSSSSSSS |
| 8060 | ATU | | *SG*SG*SC *SmA*SmU*SG*SA*STGaNC6T*SmU | |
| WV- | TGCCACUGUAGAAAGGCAUG | 685 | T*SfG*SmCfC*SmAfC*SmUfG*SmUfA*SmGfA*SmAfA | SSOSOSOSOSOSOSSSSSSSSS |
| 8061 | ATU | | *SmG*SfG*SmC*SfA*SmU*SfG*SmA*STGaNC6T* | |
| | | | SmU | |
| WV- | TGCCACUGUAGAAAGGCAUT | 686 | VPT*fG*mCfC*mAfC*mUfG*mUfA*mGfA*mAfA* | XXOXOXOXOXOXOXOOOOXX |
| 8063 | UTTTTTGGTAATCCACTTTCAG | | mGfGmCfAmU*TGaNC6T*mUTTTTTeo*Geo*Geo*Teo* | OOOOOXXXXXXXXXXXXXXXX |
| | AGG | | Aeo*A*T*m5C*m5C*A*m5C*T*T*T*m5C*Aeo* | XXX |
| | | | Geo*Aeo*Geo*Geo | |
| WV- | TGCCACUGUAGAAAGGCAUT | 687 | VPT*SfG*SmCfC*SmAfC*SmUfG*SmUfA*SmGfA* | SSOSOSOSOSOSOSSSSSSSOO |
| 8065 | UTTTTTGGTAATCCACTTTCAG | | SmAfA*SmG*SfG*SmC*SfA*SmU*STGaNC6T* | OOOXXXXXXXXXXXXXXXXXXX |
| | AGG | | SmUTTTTTeo*Geo*Geo*Teo*Aeo*A*T*m5C*m5C* | |
| | | | A*m5C*T*T*T*m5C*Aeo*Geo*Aeo*Geo*Geo | |
| WV- | TGCCACUGUAGAAAGGCAUT | 688 | VPT*SfG*SmCfC*SmAfC*SmUfG*SmUfA*SmGfA* | SSOSOSOSOSOSOSSSSSSSOO |
| 8067 | UTTTTTGGTAATCCACTTTCAG | | SmAfA*SmG*SfG*SmC*SfA*SmU*ST*SmUTTTTTeo* | OOOXXXXXXXXXXXXXXXXXXX |
| | AGG | | Geo*Geo*Teo*Aeo*A*T*m5C*m5C*A*m5C*T*T | O |
| | | | *T*m5C*Aeo*Geo*Aeo*Geo*GeoL003Mod001 | |
| WV- | TGCCACUGUAGAAAGGCAUT | 689 | T*SfG*SmCfC*SmAfC*SmUfG*SmUfA*SmGfA*SmAfA | SSOSOSOSOSOSOSSSSSSSOO |
| 8069 | UTTTTTGGTAATCCACTTTCAG | | *SmG*SfG*SmC*SfA*SmU*STGaNC6T*SmUTTTTTeo* | OOOXXXXXXXXXXXXXXXXXXX |
| | AGG | | Geo*Geo*Teo*Aeo*A*T*m5C*m5C*A*m5C*T*T | |
| | | | *T*m5C*Aeo*Geo*Aeo*Geo*Geo | |
| WV- | TGCCACUGUAGAAAGGCAUT | 690 | T*SfG*SmCfC*SmAfC*SmUfG*SmUfA*SmGfA*SmAfA | SSOSOSOSOSOSOSSSSSSSOO |
| 8071 | UTTTTTGGTAATCCACTTTCAG | | *SmG*SfG*SmC*SfA*SmU*ST*SmUTTTTTeo*Geo* | OOOXXXXXXXXXXXXXXXXXXX |
| | AGG | | Geo*Teo*Aeo*A*T*m5C*m5C*A*m5C*T*T*T* | O |
| | | | m5C*Aeo*Geo*Aeo*Geo*GeoL003Mod001 | |
| WV- | GGACCTGAGGATGGACCGCG | 691 | Mod001L001Geo*Geo*Aeo*m5Ceo*m5Ceo*T*SG*RA | OXXXXXSRSSRSSRSSSXXX |
| 8072 | | | *SG*SG*RA*ST*SG*RG*SA*5m5Ceo*5m5Ceo*Geo | |
| | | | *m5Ceo*Geo | |
| WV- | GGACCTGAGGATGGACCGCG | 692 | Mod001L001Geo*Geo*Aeo*m5Ceo*m5Ceo*T*SG*RA | OXXXXXSRSSSSSRSSXXXX |
| 8073 | | | *SG*SG*SA*ST*SG*RG*SA*Sm5Ceo*m5Ceo*Geo* | |
| | | | m5Ceo*Geo | |
| WV- | GGACCTGAGGATGGACCGCG | 693 | Mod001L001Geo*Geo*Aeo*m5Ceo*m5Ceo*T*SG*RA | OXXXXXSRSSRSSRSSXXXX |
| 8074 | | | *SG*SG*RA*ST*SG*RG*SA*Sm5Ceo*m5Ceo*Geo* | |
| | | | m5Ceo*Geo | |
| WV- | TGCCACUGUAGAAAGGCAUG | 694 | VPT*SfG*SmCfC*SmAfC*SmUfG*SmUfA*SmGfA* | SSOSOSOSOSOSOSSSSSSSSS |
| 8075 | ATU | | SmAfA*SmG*SfG*SmC*SfA*SmU*SfG*SmA*ST* | |
| | | | SmU | |
| WV- | TGCCACUGUAGAAAGGCAUG | 695 | T*SfG*SmCfC*SmAfC*SmU*SfG*SmU*SfA*SmGfA* | SSOSOSSSSSOSOSSSSSSSSS |
| 8076 | ATU | | SmAfA*SmG*SfG*SmC*SfA*SmU*SfG*SmA*ST* | |
| | | | SmU | |
| WV- | TGCCACUGUAGAAAGGCATG | 696 | T*SfG*SmCfC*SmAfC*SmUfG*SmUfA*SmGfA*SmAfA | SSOSOSOSOSOSOSOOOOOO |
| 8077 | ATU | | *SGeoGeom5CeoAeoTeoGeoAeoT*SmU | OS |
| WV- | TGCCACUGUAGAAAGGCATG | 697 | T*SfG*SmCfC*SmAfC*SmUfG*SmUfA*SmGfA*SmAfA | SSOSOSOSOSOSOSSSSSSSSS |
| 8078 | ATU | | *SGeo*SGeo*Sm5Ceo*SAeo*STeo*SGeo*SAeo*ST* | |
| | | | SmU | |
| WV- | TGCCACUGUAGAAAGGCATG | 698 | T*SfG*SmCfC*SmAfC*SmUfG*SmUfA*SmGfA*SmAfA | SSOSOSOSOSOSOSRRRRRRRS |
| 8079 | ATU | | *SGeo*RGeo*Rm5Ceo*RAeo*RTeo*RGeo*RAeo*RT* | |
| | | | SmU | |
| WV- | TGCCACUGUAGAAAGGCATG | 699 | T*SfG*SmCfC*SmAfC*SmUfG*SmUfA*SmGfA*SmAfA | SSOSOSOSOSOSOSSSSSSSSS |
| 8080 | ATU | | *SG*SG*SC*SA*ST*SG*SA*ST*SmU | |
| WV- | TGCCACUGUAGAAAGGCAUG | 700 | T*SfG*SmCfC*SmAfC*SmUfG*SmUfA*SmGfA*SmAfA | SSOSOSOSOSOSOSSSSSSSSS |
| 8081 | ATU | | *SG*SG*SC*SmA*SmU*SG*SA*ST*SmU | |
| WV- | GGACCTGAGGATGGACCGCG | 701 | Geo*GeoAeom5Ceom5Ceo*T*G*A*G*G*A*T*G*G | XOOOXXXXXXXXXXXOOOX |
| 8082 | | | *A*m5Ceom5CeoGeom5Ceo*Geo | |
| WV- | GGACCTGAGGATGGACCGCG | 702 | mG*SmGmAm5CeomC*ST*SG*RA*SG*SG*RA*ST* | SOOOSSRSSRSSRSSOOOS |
| 8083 | | | SG*RG*SA*Sm5Ceom5CeomGmC*SmG | |
| WV- | GGACCTGAGGATGGACCGCG | 703 | Geo*SGeo*SAeo*Sm5Ceo*Sm5Ceo*ST*SG*RA*SG* | SSSSSSRSSRSSRSSSSSS |
| 8084 | | | SG*RA*ST*SG*RG*SA*Sm5Ceo*Sm5Ceo*SGeo* | |
| | | | Sm5Ceo*SGeo | |
| WV- | GGACCTGAGGATGGACCGCG | 704 | Geo*RGeo*RAeo*Rm5Ceo*Rm5Ceo*RT*SG*RA*SG* | RRRRRSRSSRSSRSSRRRR |
| 8085 | | | SG*RA*ST*SG*RG*SA*Sm5Ceo*Rm5Ceo*RGeo* | |
| | | | Rm5Ceo*RGeo | |
| WV- | GGACCTGAGGATGGACCGCG | 705 | Geo*SGeoAeom5Ceom5Ceo*ST*SG*RA*SG*SG*RA* | SOOOSSRSSRSSRSSOOOS |
| 8086 | | | ST*SG*RG*SA*Sm5Ceom5CeoGeom5Ceo*SGeo | |
| WV- | GGACCTGAGGATGGACCGCG | 706 | Geo*SGeoAeom5Ceom5Ceo*RT*SG*RA*SG*SG*RA* | SOOORSRSSRSSRSSOOOS |
| 8087 | | | ST*SG*RG*SA*Sm5Ceom5CeoGeom5Ceo*SGeo | |
| WV- | GGACCTGAGGATGGACCGCG | 707 | Geo*RGeoAeom5Ceom5Ceo*ST*SG*RA*SG*SG*RA* | ROOOSSRSSRSSRSSOOOR |
| 8088 | | | ST*SG*RG*SA*Sm5Ceom5CeoGeom5Ceo*RGeo | |
| WV- | GGACCTGAGGATGGACCGCG | 708 | Geo*RGeoAeom5Ceom5Ceo*RT*SG*RA*SG*SG*RA* | ROOORSRSSRSSRSSOOOR |
| 8089 | | | ST*SG*RG*SA*Sm5Ceom5CeoGeom5Ceo*RGeo | |
| WV- | GGACCTGAGGATGGACCGCG | 709 | mG*SmG*SmA*SmC*SmC*ST*SG*RA*SG*SG*RA* | SSSSSSRSSRSSRSSSSSS |
| 8090 | | | ST*SG*RG*SA*SmC*SmC*SmG*SmC*SmG | |
| WV- | GGACCTGAGGATGGACCGCG | 710 | mG*RmG*RmA*RmC*RmC*RT*SG*RA*SG*SG*RA | RRRRRSRSSRSSRSSRRRR |
| 8091 | | | *ST*SG*RG*SA*SmC*RmC*RmG*RmC*RmG | |
| WV- | GGACCTGAGGATGGACCGCG | 711 | mG*SmG*RmA*RmC*RmC*RT*SG*RA*SG*SG*RA | SRRRRSRSSRSSRSSRRRS |
| 8092 | | | *ST*SG*RG*SA*SmC*RmC*RmG*RmC*SmG | |
| WV- | GGACCTGAGGATGGACCGCG | 712 | mG*SmGmAmCmC*ST*SG*RA*SG*SG*RA*ST*SG* | SOOOSSRSSRSSRSSOOOS |
| 8093 | | | RG*SA*SmCmCmGmC*SmG | |
| WV- | TGCCACUGUAGAAAGGCAUG | 713 | VPT*SfG*SmCfC*SmAfC*SmUfG*SmUfA*SmGfA* | SSOSOSOSOSOSOSSSSSSSSS |
| 8094 | ATU | | SmAfA*SmG*SfG*SmC*SfA*SmU*SfG*SmA*SAMC6T | |
| | | | *SmU | |
| WV- | TGCCACUGUAGAAAGGCAUG | 714 | T*SfG*SmCfC*SmAfC*SmUfG*SmUfA*SmGfA*SmAfA | SSOSOSOSOSOSOSSSSSSSSS |
| 8095 | ATU | | *SmG*SfG*SmC*SfA*SmU*SfG*SmA*SAMC6T*SmU | |
| WV- | CUGUGACGUGGAGGAUCCCA | 715 | rCrUrGrUrGrArCrGrUrGrGrArGrGrArUrCrCrCrAr | OOOOOOOOOOOOOOOOOO |
| 8096 | GCCUCUG | | GrCrCrUrCrUrG | OOOOOOOO |
| WV- | GGACCTGAGGATGGACCGCG | 716 | Mod001L001mG*SmG*SmA*SmC*SmC*ST*SG*RA* | OSSSSSSRSSSSSRSSSSSS |
| 8111 | | | SG*SG*SA*ST*SG*RG*SA*SmC*SmC*SmG*SmC* | |
| | | | SmG | |
| WV- | GGACCTGAGGATGGACCGCG | 717 | Mod001L001mG*SmG*SmA*SmC*SmC*ST*SG*RA* | OSSSSSSRSSSSSRSSRRRR |
| 8112 | | | SG*SG*SA*ST*SG*RG*SA*Sm5Ceo*Rm5Ceo*RGeo | |
| | | | *Rm5Ceo*RGeo | |
| WV- | CTGTAGAAAGGCATGAAGCA | 718 | Mod001L001m5Ceo*TeoGeoTeoAeo*G*A*A*A*G*G* | OXOOOXXXXXXXXXXXOOOX |
| 8132 | | | C*A*T*G*AeoAeoGeom5Ceo*Aeo | |
| WV- | CTGTAGAAAGGCATGAAGCA | 719 | Mod001L001m5Ceo*RTeoGeoTeoAeo*RG*SA*SA*SA* | OROOORSSSSRSSRSSOOOR |
| 8133 | | | SG*RG*SC*SA*RT*SG*SAeoAeoGeom5Ceo*RAeo | |
| WV- | CCACTGTAGAAAGGCATGAA | 720 | Mod001L001m5Ceo*m5CeoAeom5CeoTeo*G*T*A*G* | OXOOOXXXXXXXXXXXOOOX |
| 8134 | | | A*A*A*G*G*C*AeoTeoGeoAeo*Aeo | |
| WV- | CCACTGTAGAAAGGCATGAA | 721 | Mod001L001m5Ceo*Rm5CeoAeom5CeoTeo*RG*ST*SA* | OROOORSSSSSSSRSSOOOR |
| 8135 | | | SG*SA*SA*SA*SG*RG*SC*SAeoTeoGeoAeo*RAeo | |
| WV- | CTGTAGAAAGGCATGAAGCA | 722 | Mod001L001m5Ceo*Teo*Geo*Teo*Aeo*G*A*A*A* | OXXXXXXXXXXXXXXXXXXX |
| 8136 | | | G*G*C*A*T*G*Aeo*Aeo*Geo*m5Ceo*Aeo | |
| WV- | CTGTAGAAAGGCATGAAGCA | 723 | Mod001L001m5Ceo*RTeo*RGeo*RTeo*RAeo*RG*SA* | ORRRRRSSSSRSSRSSRRRR |
| 8137 | | | SA*SA*SG*RG*SC*SA*RT*SG*SAeo*RAeo*RGeo* | |
| | | | Rm5Ceo*RAeo | |
| WV- | CAUGAAGCAGGAACAUACCA | 724 | mC*mA*mU*mG*mA*A*G*C*A*G*G*A*A*C* | XXXXXXXXXXXXXXXXXXX |
| 8138 | | | A*mU*mA*mC*mC*mA | |
| WV- | GCAUGAAGCAGGAACAUACC | 725 | mG*mC*mA*mU*mG*A*A*G*C*A*G*G*A*A* | XXXXXXXXXXXXXXXXXXX |
| 8139 | | | C*mA*mU*mA*mC*mC | |
| WV- | GGCAUGAAGCAGGAACAUAC | 726 | mG*mG*mC*mA*mU*G*A*A*G*C*A*G*G*A* | XXXXXXXXXXXXXXXXXXX |
| 8140 | | | A*mC*mA*mU*mA*mC | |
| WV- | AGGCATGAAGCAGGAACAUA | 727 | mA*mG*mG*mC*mA*T*G*A*A*G*C*A*G*G* | XXXXXXXXXXXXXXXXXXX |
| 8141 | | | A*mA*mC*mA*mU*mA | |
| WV- | AAGGCATGAAGCAGGAACAU | 728 | mA*mA*mG*mG*mC *A*T*G*A*A*G*C*A*G* | XXXXXXXXXXXXXXXXXXX |
| 8142 | | | G*mA*mA*mC*mA*mU | |
| WV- | AAAGGCATGAAGCAGGAACA | 729 | mA*mA*mA*mG*mG*C*A*T*G*A*A*G*C*A* | XXXXXXXXXXXXXXXXXXX |
| 8143 | | | G*mG*mA*mA*mC*mA | |
| WV- | GAAAGGCATGAAGCAGGAAC | 730 | mG*mA*mA*mA*mG*G*C*A*T*G*A*A*G*C* | XXXXXXXXXXXXXXXXXXX |
| 8144 | | | A*mG*mG*mA*mA*mC | |
| WV- | AGAAAGGCATGAAGCAGGAA | 731 | mA*mG*mA*mA*mA*G*G*C*A*T*G*A*A*G* | XXXXXXXXXXXXXXXXXXX |
| 8145 | | | C*mA*mG*mG*mA*mA | |
| WV- | UAGAAAGGCATGAAGCAGGA | 732 | mU*mA*mG*mA*mA*A*G*G*C*A*T*G*A*A* | XXXXXXXXXXXXXXXXXXX |
| 8146 | | | G*mC*mA*mG*mG*mA | |
| WV- | GUAGAAAGGCATGAAGCAGG | 733 | mG*mU*mA*mG*mA*A*A*G*G*C*A*T*G*A* | XXXXXXXXXXXXXXXXXXX |
| 8147 | | | A*mG*mC*mA*mG*mG | |
| WV- | UGUAGAAAGGCATGAAGCAG | 734 | mU*mG*mU*mA*mG*A*A*A*G*G*C*A*T*G* | XXXXXXXXXXXXXXXXXXX |
| 8148 | | | A*mA*mG*mC*mA*mG | |
| WV- | CUGUAGAAAGGCATGAAGCA | 735 | mC*mU*mG*mU*mA*G*A*A*A*G*G*C*A*T* | XXXXXXXXXXXXXXXXXXX |
| 8149 | | | G*mA*mA*mG*mC*mA | |
| WV- | ACUGUAGAAAGGCATGAAGC | 736 | mA*mC*mU*mG*mU*A*G*A*A*A*G*G*C*A* | XXXXXXXXXXXXXXXXXXX |
| 8150 | | | T*mG*mA*mA*mG*mC | |
| WV- | CACUGTAGAAAGGCAUGAAG | 737 | mC*mA*mC*mU*mG*T*A*G*A*A*A*G*G*C* | XXXXXXXXXXXXXXXXXXX |
| 8151 | | | A*mU*mG*mA*mA*mG | |
| WV- | CCACUGTAGAAAGGCAUGAA | 738 | mC*mC*mA*mC*mU*G*T*A*G*A*A*A*G*G* | XXXXXXXXXXXXXXXXXXX |
| 8152 | | | C*mA*mU*mG*mA*mA | |
| WV- | GCCACTGTAGAAAGGCAUGA | 739 | mG*mC*mC*mA*mC*T*G*T*A*G*A*A*A*G* | XXXXXXXXXXXXXXXXXXX |
| 8153 | | | G*mC*mA*mU*mG*mA | |
| WV- | GGCCACTGTAGAAAGGCAUG | 740 | mG*mG*mC*mC*mA*C*T*G*T*A*G*A*A*A* | XXXXXXXXXXXXXXXXXXX |
| 8154 | | | G*mG*mC*mA*mU*mG | |
| WV- | AGGCCACTGTAGAAAGGCAU | 741 | mA*mG*mG*mC*mC*A*C*T*G*T*A*G*A*A* | XXXXXXXXXXXXXXXXXXX |
| 8155 | | | A*mG*mG*mC*mA*mU | |
| WV- | AAGGCCACTGTAGAAAGGCA | 742 | mA*mA*mG*mG*mC*C*A*C*T*G*T*A*G*A* | XXXXXXXXXXXXXXXXXXX |
| 8156 | | | A*mA*mG*mG*mC*mA | |
| WV- | UAAGGCCACTGTAGAAAGGC | 743 | mU*mA*mA*mG*mG*C*C*A*C*T*G*T*A*G* | XXXXXXXXXXXXXXXXXXX |
| 8157 | | | A*mA*mA*mG*mG*mC | |
| WV- | AUAAGGCCACTGTAGAAAGG | 744 | mA*mU*mA*mA*mG*G*C*C*A*C*T*G*T*A* | XXXXXXXXXXXXXXXXXXX |
| 8158 | | | G*mA*mA*mA*mG*mG | |
| WV- | GAUAAGGCCACTGTAGAAAG | 745 | mG*mA*mU*mA*mA*G*G*C*C*A*C*T*G*T* | XXXXXXXXXXXXXXXXXXX |
| 8159 | | | A*mG*mA*mA*mA*mG | |
| WV- | GGAUAAGGCCACTGTAGAAA | 746 | mG*mG*mA*mU*mA*A*G*G*C*C*A*C*T*G* | XXXXXXXXXXXXXXXXXXX |
| 8160 | | | T*mA*mG*mA*mA*mA | |
| WV- | CATGAAGCAGGAACATACCA | 747 | m5Ceo*Aeo*Teo*Geo*Aeo*A*G*C*A*G*G*A*A | XXXXXXXXXXXXXXXXXXX |
| 8161 | | | *C*A*Teo*Aeo*m5Ceo*m5Ceo*Aeo | |
| WV- | GCATGAAGCAGGAACATACC | 748 | Geo*m5Ceo*Aeo*Teo*Geo*A*A*G*C*A*G*G*A | XXXXXXXXXXXXXXXXXXX |
| 8162 | | | *A*C*Aeo*Teo*Aeo*m5Ceo*m5Ceo | |
| WV- | GGCATGAAGCAGGAACATAC | 749 | Geo*Geo*m5Ceo*Aeo*Teo*G*A*A*G*C*A*G*G | XXXXXXXXXXXXXXXXXXX |
| 8163 | | | *A*A*m5Ceo*Aeo*Teo*Aeo*m5Ceo | |
| WV- | AGGCATGAAGCAGGAACATA | 750 | Aeo*Geo*Geo*m5Ceo*Aeo*T*G*A*A*G*C*A*G | XXXXXXXXXXXXXXXXXXX |
| 8164 | | | *G*A*Aeo*m5Ceo*Aeo*Teo*Aeo | |
| WV- | AAGGCATGAAGCAGGAACAT | 751 | Aeo*Aeo*Geo*Geo*m5Ceo*A*T*G*A*A*G*C*A | XXXXXXXXXXXXXXXXXXX |
| 8165 | | | *G*G*Aeo*Aeo*m5Ceo*Aeo*Teo | |
| WV- | AAAGGCATGAAGCAGGAACA | 752 | Aeo*Aeo*Aeo*Geo*Geo*C*A*T*G*A*A*G*C*A | XXXXXXXXXXXXXXXXXXX |
| 8166 | | | *G*Geo*Aeo*Aeo*m5Ceo*Aeo | |
| WV- | GAAAGGCATGAAGCAGGAAC | 753 | Geo*Aeo*Aeo*Aeo*Geo*G*C*A*T*G*A*A*G* | XXXXXXXXXXXXXXXXXXX |
| 8167 | | | C*A*Geo*Geo*Aeo*Aeo*m5Ceo | |
| WV- | AGAAAGGCATGAAGCAGGAA | 754 | Aeo*Geo*Aeo*Aeo*Aeo*G*G*C*A*T*G*A*A* | XXXXXXXXXXXXXXXXXXX |
| 8168 | | | G*C*Aeo*Geo*Geo*Aeo*Aeo | |
| WV- | TAGAAAGGCATGAAGCAGGA | 755 | Teo*Aeo*Geo*Aeo*Aeo*A*G*G*C*A*T*G*A*A | XXXXXXXXXXXXXXXXXXX |
| 8169 | | | *G*m5Ceo*Aeo*Geo*Geo*Aeo | |
| WV- | GTAGAAAGGCATGAAGCAGG | 756 | Geo*Teo*Aeo*Geo*Aeo*A*A*G*G*C*A*T*G* | XXXXXXXXXXXXXXXXXXX |
| 8170 | | | A*A*Geo*m5Ceo*Aeo*Geo*Geo | |
| WV- | TGTAGAAAGGCATGAAGCAG | 757 | Teo*Geo*Teo*Aeo*Geo*A*A*A*G*G*C*A*T*G | XXXXXXXXXXXXXXXXXXX |
| 8171 | | | *A*Aeo*Geo*m5Ceo*Aeo*Geo | |
| WV- | CTGTAGAAAGGCATGAAGCA | 758 | m5Ceo*Teo*Geo*Teo*Aeo*G*A*A*A*G*G*C*A | XXXXXXXXXXXXXXXXXXX |
| 8172 | | | *T*G*Aeo*Aeo*Geo*m5Ceo*Aeo | |
| WV- | ACTGTAGAAAGGCATGAAGC | 759 | Aeo*m5Ceo*Teo*Geo*Teo*A*G*A*A*A*G*G*C | XXXXXXXXXXXXXXXXXXX |
| 8173 | | | *A*T*Geo*Aeo*Aeo*Geo*m5Ceo | |
| WV- | CACTGTAGAAAGGCATGAAG | 760 | m5Ceo*Aeo*m5Ceo*Teo*Geo*T*A*G*A*A*A*G | XXXXXXXXXXXXXXXXXXX |
| 8174 | | | *G*C*A*Teo*Geo*Aeo*Aeo*Geo | |
| WV- | CCACTGTAGAAAGGCATGAA | 761 | m5Ceo*m5Ceo*Aeo*m5Ceo*Teo*G*T*A*G*A*A* | XXXXXXXXXXXXXXXXXXX |
| 8175 | | | A*G*G*C*Aeo*Teo*Geo*Aeo*Aeo | |
| WV- | GCCACTGTAGAAAGGCATGA | 762 | Geo*m5Ceo*m5Ceo*Aeo*m5Ceo*T*G*T*A*G*A* | XXXXXXXXXXXXXXXXXXX |
| 8176 | | | A*A*G*G*m5Ceo*Aeo*Teo*Geo*Aeo | |
| WV- | GGCCACTGTAGAAAGGCATG | 763 | Geo*Geo*m5Ceo*m5Ceo*Aeo*C*T*G*T*A*G*A | XXXXXXXXXXXXXXXXXXX |
| 8177 | | | *A*A*G*Geo*m5Ceo*Aeo*Teo*Geo | |
| WV- | AGGCCACTGTAGAAAGGCAT | 764 | Aeo*Geo*Geo*m5Ceo*m5Ceo*A*C*T*G*T*A*G | XXXXXXXXXXXXXXXXXXX |
| 8178 | | | *A*A*A*Geo*Geo*m5Ceo*Aeo*Teo | |
| WV- | AAGGCCACTGTAGAAAGGCA | 765 | Aeo*Aeo*Geo*Geo*m5Ceo*C*A*C*T*G*T*A*G | XXXXXXXXXXXXXXXXXXX |
| 8179 | | | *A*A*Aeo*Geo*Geo*m5Ceo*Aeo | |
| WV- | TAAGGCCACTGTAGAAAGGC | 766 | Teo*Aeo*Aeo*Geo*Geo*C*C*A*C*T*G*T*A*G | XXXXXXXXXXXXXXXXXXX |
| 8180 | | | *A*Aeo*Aeo*Geo*Geo*m5Ceo | |
| WV- | ATAAGGCCACTGTAGAAAGG | 767 | Aeo*Teo*Aeo*Aeo*Geo*G*C*C*A*C*T*G*T*A | XXXXXXXXXXXXXXXXXXX |
| 8181 | | | *G*Aeo*Aeo*Aeo*Geo*Geo | |
| WV- | GATAAGGCCACTGTAGAAAG | 768 | Geo*Aeo*Teo*Aeo*Aeo*G*G*C*C*A*C*T*G*T | XXXXXXXXXXXXXXXXXXX |
| 8182 | | | *A*Geo*Aeo*Aeo*Aeo*Geo | |
| WV- | GGATAAGGCCACTGTAGAAA | 769 | Geo*Geo*Aeo*Teo*Aeo*A*G*G*C*C*A*C*T*G | XXXXXXXXXXXXXXXXXXX |
| 8183 | | | *T*Aeo*Geo*Aeo*Aeo*Aeo | |
| WV- | CAUGAAGCAGGAACAUACCA | 770 | m5IC*mA*mU*mG*mA*A*G*C*A*G*G*A*A*C | XXXXXXXXXXXXXXXXXXX |
| 8184 | | | *A*mU*mA*mC*mC*IA | |
| WV- | GCAUGAAGCAGGAACAUACC | 771 | IG*mC*mA*mU*mG*A*A*G*C*A*G*G*A*A*C | XXXXXXXXXXXXXXXXXXX |
| 8185 | | | *mA*mU*mA*mC*m5IC | |
| WV- | GGCAUGAAGCAGGAACAUAC | 772 | IG*mG*mC*mA*mU*G*A*A*G*C*A*G*G*A* | XXXXXXXXXXXXXXXXXXX |
| 8186 | | | A*mC*mA*mU*mA*m5IC | |
| WV- | AGGCATGAAGCAGGAACAUA | 773 | IA*mG*mG*mC*mA*T*G*A*A*G*C*A*G*G*A | XXXXXXXXXXXXXXXXXXX |
| 8187 | | | *mA*mC*mA*mU*IA | |
| WV- | AAGGCATGAAGCAGGAACAT | 774 | IA*mA*mG*mG*mC*A*T*G*A*A*G*C*A*G*G | XXXXXXXXXXXXXXXXXXX |
| 8188 | | | *mA*mA*mC*mA*IT | |
| WV- | AAAGGCATGAAGCAGGAACA | 775 | IA*mA*mA*mG*mG*C*A*T*G*A*A*G*C*A*G | XXXXXXXXXXXXXXXXXXX |
| 8189 | | | *mG*mA*mA*mC*IA | |
| WV- | GAAAGGCATGAAGCAGGAAC | 776 | IG*mA*mA*mA*mG*G*C*A*T*G*A*A*G*C*A | XXXXXXXXXXXXXXXXXXX |
| 8190 | | | *mG*mG*mA*mA*m5IC | |
| WV- | AGAAAGGCATGAAGCAGGAA | 777 | IA*mG*mA*mA*mA*G*G*C*A*T*G*A*A*G*C | XXXXXXXXXXXXXXXXXXX |
| 8191 | | | *mA*mG*mG*mA*IA | |
| WV- | TAGAAAGGCATGAAGCAGGA | 778 | IT*mA*mG*mA*mA*A*G*G*C*A*T*G*A*A*G | XXXXXXXXXXXXXXXXXXX |
| 8192 | | | *mC*mA*mG*mG*IA | |
| WV- | GUAGAAAGGCATGAAGCAGG | 779 | IG*mU*mA*mG*mA*A*A*G*G*C*A*T*G*A*A | XXXXXXXXXXXXXXXXXXX |
| 8193 | | | *mG*mC*mA*mG*IG | |
| WV- | TGUAGAAAGGCATGAAGCAG | 780 | IT*mG*mU*mA*mG*A*A*A*G*G*C*A*T*G*A | XXXXXXXXXXXXXXXXXXX |
| 8194 | | | *mA*mG*mC*mA*IG | |
| WV- | CUGUAGAAAGGCATGAAGCA | 781 | m5IC*mU*mG*mU*mA*G*A*A*A*G*G*C*A*T | XXXXXXXXXXXXXXXXXXX |
| 8195 | | | *G*mA*mA*mG*mC*IA | |
| WV- | ACUGUAGAAAGGCATGAAGC | 782 | IA*mC*mU*mG*mU*A*G*A*A*A*G*G*C*A*T | XXXXXXXXXXXXXXXXXXX |
| 8196 | | | *mG*mA*mA*mG*m5IC | |
| WV- | CACUGTAGAAAGGCAUGAAG | 783 | m5IC*mA*mC*mU*mG*T*A*G*A*A*A*G*G*C | XXXXXXXXXXXXXXXXXXX |
| 8197 | | | *A*mU*mG*mA*mA*IG | |
| WV- | CCACUGTAGAAAGGCAUGAA | 784 | m5IC*mC*mA*mC*mU*G*T*A*G*A*A*A*G*G | XXXXXXXXXXXXXXXXXXX |
| 8198 | | | *C*mA*mU*mG*mA*IA | |
| WV- | GCCACTGTAGAAAGGCAUGA | 785 | IG*mC*mC*mA*mC*T*G*T*A*G*A*A*A*G*G | XXXXXXXXXXXXXXXXXXX |
| 8199 | | | *mC*mA*mU*mG*IA | |
| WV- | GGCCACTGTAGAAAGGCAUG | 786 | IG*mG*mC*mC*mA*C*T*G*T*A*G*A*A*A*G | XXXXXXXXXXXXXXXXXXX |
| 8200 | | | *mG*mC*mA*mU*IG | |
| WV- | AGGCCACTGTAGAAAGGCAT | 787 | IA*mG*mG*mC*mC*A*C*T*G*T*A*G*A*A*A | XXXXXXXXXXXXXXXXXXX |
| 8201 | | | *mG*mG*mC*mA*IT | |
| WV- | AAGGCCACTGTAGAAAGGCA | 788 | IA*mA*mG*mG*mC*C*A*C*T*G*T*A*G*A*A | XXXXXXXXXXXXXXXXXXX |
| 8202 | | | *mA*mG*mG*mC*IA | |
| WV- | TAAGGCCACTGTAGAAAGGC | 789 | IT*mA*mA*mG*mG*C*C*A*C*T*G*T*A*G*A | XXXXXXXXXXXXXXXXXXX |
| 8203 | | | *mA*mA*mG*mG*m5IC | |
| WV- | AUAAGGCCACTGTAGAAAGG | 790 | IA*mU*mA*mA*mG*G*C*C*A*C*T*G*T*A*G | XXXXXXXXXXXXXXXXXXX |
| 8204 | | | *mA*mA*mA*mG*IG | |
| WV- | GAUAAGGCCACTGTAGAAAG | 791 | IG*mA*mU*mA*mA*G*G*C*C*A*C*T*G*T*A | XXXXXXXXXXXXXXXXXXX |
| 8205 | | | *mG*mA*mA*mA*IG | |
| WV- | GGAUAAGGCCACTGTAGAAA | 792 | IG*mG*mA*mU*mA*A*G*G*C*C*A*C*T*G*T | XXXXXXXXXXXXXXXXXXX |
| 8206 | | | *mA*mG*mA*mA*IA | |
| WV- | CATGAAGCAGGAACATACCA | 793 | m5IC*Aeo*Teo*Geo*Aeo*A*G*C*A*G*G*A*A* | XXXXXXXXXXXXXXXXXXX |
| 8207 | | | C*A*Teo*Aeo*m5Ceo*m5Ceo*IA | |
| WV- | GCATGAAGCAGGAACATACC | 794 | IG*m5Ceo*Aeo*Teo*Geo*A*A*G*C*A*G*G*A* | XXXXXXXXXXXXXXXXXXX |
| 8208 | | | A*C*Aeo*Teo*Aeo*m5Ceo*m5IC | |
| WV- | GGCATGAAGCAGGAACATAC | 795 | IG*Geo*m5Ceo*Aeo*Teo*G*A*A*G*C*A*G*G* | XXXXXXXXXXXXXXXXXXX |
| 8209 | | | A*A*m5Ceo*Aeo*Teo*Aeo*m5IC | |
| WV- | AGGCATGAAGCAGGAACATA | 796 | IA*Geo*Geo*m5Ceo*Aeo*T*G*A*A*G*C*A*G* | XXXXXXXXXXXXXXXXXXX |
| 8210 | | | G*A*Aeo*m5Ceo*Aeo*Teo*IA | |
| WV- | AAGGCATGAAGCAGGAACAT | 797 | IA*Aeo*Geo*Geo*m5Ceo*A*T*G*A*A*G*C*A* | XXXXXXXXXXXXXXXXXXX |
| 8211 | | | G*G*Aeo*Aeo*m5Ceo*Aeo*IT | |
| WV- | AAAGGCATGAAGCAGGAACA | 798 | IA*Aeo*Aeo*Geo*Geo*C*A*T*G*A*A*G*C*A* | XXXXXXXXXXXXXXXXXXX |
| 8212 | | | G*Geo*Aeo*Aeo*m5Ceo*IA | |
| WV- | GAAAGGCATGAAGCAGGAAC | 799 | IG*Aeo*Aeo*Aeo*Geo*G*C*A*T*G*A*A*G*C* | XXXXXXXXXXXXXXXXXXX |
| 8213 | | | A*Geo*Geo*Aeo*Aeo*m5IC | |
| WV- | AGAAAGGCATGAAGCAGGAA | 800 | IA*Geo*Aeo*Aeo*Aeo*G*G*C*A*T*G*A*A*G | XXXXXXXXXXXXXXXXXXX |
| 8214 | | | *C*Aeo*Geo*Geo*Aeo*IA | |
| WV- | TAGAAAGGCATGAAGCAGGA | 801 | IT*Aeo*Geo*Aeo*Aeo*A*G*G*C*A*T*G*A*A* | XXXXXXXXXXXXXXXXXXX |
| 8215 | | | G*m5Ceo*Aeo*Geo*Geo*IA | |
| WV- | GTAGAAAGGCATGAAGCAGG | 802 | IG*Teo*Aeo*Geo*Aeo*A*A*G*G*C*A*T*G*A* | XXXXXXXXXXXXXXXXXXX |
| 8216 | | | A*Geo*m5Ceo*Aeo*Geo*IG | |
| WV- | TGTAGAAAGGCATGAAGCAG | 803 | IT*Geo*Teo*Aeo*Geo*A*A*A*G*G*C*A*T*G* | XXXXXXXXXXXXXXXXXXX |
| 8217 | | | A*Aeo*Geo*m5Ceo*Aeo*IG | |
| WV- | CTGTAGAAAGGCATGAAGCA | 804 | m5IC*Teo*Geo*Teo*Aeo*G*A*A*A*G*G*C*A* | XXXXXXXXXXXXXXXXXXX |
| 8218 | | | T*G*Aeo*Aeo*Geo*m5Ceo*IA | |
| WV- | ACTGTAGAAAGGCATGAAGC | 805 | IA*m5Ceo*Teo*Geo*Teo*A*G*A*A*A*G*G*C* | XXXXXXXXXXXXXXXXXXX |
| 8219 | | | A*T*Geo*Aeo*Aeo*Geo*m5IC | |
| WV- | CACTGTAGAAAGGCATGAAG | 806 | m5IC*Aeo*m5Ceo*Teo*Geo*T*A*G*A*A*A*G* | XXXXXXXXXXXXXXXXXXX |
| 8220 | | | G*C*A*Teo*Geo*Aeo*Aeo*IG | |
| WV- | CCACTGTAGAAAGGCATGAA | 807 | m5IC*m5Ceo*Aeo*m5Ceo*Teo*G*T*A*G*A*A*A | XXXXXXXXXXXXXXXXXXX |
| 8221 | | | *G*G*C*Aeo*Teo*Geo*Aeo*IA | |
| WV- | GCCACTGTAGAAAGGCATGA | 808 | IG*m5Ceo*m5Ceo*Aeo*m5Ceo*T*G*T*A*G*A*A | XXXXXXXXXXXXXXXXXXX |
| 8222 | | | *A*G*G*m5Ceo*Aeo*Teo*Geo*IA | |
| WV- | GGCCACTGTAGAAAGGCATG | 809 | IG*Geo*m5Ceo*m5Ceo*Aeo*C*T*G*T*A*G*A* | XXXXXXXXXXXXXXXXXXX |
| 8223 | | | A*A*G*Geo*m5Ceo*Aeo*Teo*IG | |
| WV- | AGGCCACTGTAGAAAGGCAT | 810 | IA*Geo*Geo*m5Ceo*m5Ceo*A*C*T*G*T*A*G* | XXXXXXXXXXXXXXXXXXX |
| 8224 | | | A*A*A*Geo*Geo*m5Ceo*Aeo*IT | |
| WV- | AAGGCCACTGTAGAAAGGCA | 811 | IA*Aeo*Geo*Geo*m5Ceo*C*A*C*T*G*T*A*G* | XXXXXXXXXXXXXXXXXXX |
| 8225 | | | A*A*Aeo*Geo*Geo*m5Ceo*IA | |
| WV- | TAAGGCCACTGTAGAAAGGC | 812 | IT*Aeo*Aeo*Geo*Geo*C*C*A*C*T*G*T*A*G* | XXXXXXXXXXXXXXXXXXX |
| 8226 | | | A*Aeo*Aeo*Geo*Geo*m5IC | |
| WV- | ATAAGGCCACTGTAGAAAGG | 813 | IA*Teo*Aeo*Aeo*Geo*G*C*C*A*C*T*G*T*A* | XXXXXXXXXXXXXXXXXXX |
| 8227 | | | G*Aeo*Aeo*Aeo*Geo*IG | |
| WV- | GATAAGGCCACTGTAGAAAG | 814 | IG*Aeo*Teo*Aeo*Aeo*G*G*C*C*A*C*T*G*T* | XXXXXXXXXXXXXXXXXXX |
| 8228 | | | A*Geo*Aeo*Aeo*Aeo*IG | |
| WV- | GGATAAGGCCACTGTAGAAA | 815 | IG*Geo*Aeo*Teo*Aeo*A*G*G*C*C*A*C*T*G* | XXXXXXXXXXXXXXXXXXX |
| 8229 | | | T*Aeo*Geo*Aeo*Aeo*IA | |
| WV- | TGCCACUGUAGAAAGG | 816 | T*SfG*SmCfC*SmAfC*SmUfG*SmUfA*SmGfA* | SSOSOSOSOSOSOSSSSSSS |
| 8071 | CAUTUTTTTTGG | | SmAfA*SmG*SfG*SmC*SfA*SmU*ST*SmUTTTTTeo | OOOOO |
| | TAATCCACTTTCAGAGG | | *Geo*Geo*Teo*Aeo*A*T*m5C*m5C*A*m5C*T | XXXXXXXXXXXXXXXXXXXO |
| | | | *T*T*m5C*Aeo*Geo*Aeo*Geo*GeoL003Mod001 | |
| WV- | TGCCACUGUAGAAAGG | 817 | T*SfG*SmCfC*SmAfC*SmUfG*SmUfA*SmGfA* | SSOSOSOSOSOSOSSSSSSS |
| 8069 | CAUTUTTTTTGG | | SmAfA*SmG*SfG*SmC*SfA*SmU*STGaNC6T* | OOOOO |
| | TAATCCACTTTCAGAGG | | SmUTTTTTeo*Geo*Geo*Teo*Aeo*A*T*m5C*m5C | XXXXXXXXXXXXXXXXXXX |
| | | | *A*m5C*T*T*T*m5C*Aeo*Geo*Aeo*Geo*Geo | |
| WV- | TGCCACUGUAGAAAGG | 818 | VPT*SfG*SmCfC*SmAfC*SmUfG*SmUfA*SmGfA* | SSOSOSOSOSOSOSSSSSSS |
| 8067 | CAUTUTTTTTGG | | SmAfA*SmG*SfG*SmC*SfA*SmU*ST*SmUTTTTTeo | OOOOO |
| | TAATCCACTTTCAGAGG | | *Geo*Geo*Teo*Aeo*A*T*m5C*m5C*A*m5C*T | XXXXXXXXXXXXXXXXXXXO |
| | | | *T*T*m5C*Aeo*Geo*Aeo*Geo*GeoL003Mod001 | |
| WV- | TGCCACUGUAGAAAGG | 819 | VPT*SfG*SmCfC*SmAfC*SmUfG*SmUfA*SmGfA* | SSOSOSOSOSOSOSSSSSS |
| 8065 | CAUTUTTTTTGG | | SmAfA*SmG*SfG*SmC*SfA*SmU*STGaNC6T* | SOOOOO |
| | TAATCCACTTTCAGAGG | | SmUTTTTTeo*Geo*Geo*Teo*Aeo*A*T*m5C*m5C | XXXXXXXXXXXXXXXXXXX |
| | | | *A*m5C*T*T*T*m5C*Aeo*Geo*Aeo*Geo*Geo | |
| WV- | TGCCACUGUAGAAAGG | 820 | VPT*fG*mCfC*mAfC*mUfG*mUfA*mGfA*mAfA* | XXOXOXOXOXOXOXOOOO |
| 8063 | CAUTUTTTTTGG | | mGfGmCfAmU*TGaNC6T*mUTTTTTeo*Geo*Geo*Teo | XXOOOOOXXXXXXXXXXX |
| | TAATCCACTTTCAGAGG | | *Aeo*A*T*m5C*m5C*A*m5C*T*T*T*m5C* | XXXXXXXX |
| | | | Aeo*Geo*Aeo*Geo*Geo | |
| WV- | UUGGUAUGUUCCUGCUUCAU | 821 | rUrUrGrGrUrArUrGrUrUrCrCrUrGrCrU | OOOOOOOOOOOOOOOOOOOO |
| 8233 | GCCUUUCUACAGUGGCCUUAUCCC | | rUrCrArUrGrCrCrUrUrUrCrUrArCrArG | OOOOOOOOOOOOOOOOOOOO |
| | | | rUrGrGrCrCrUrUrArUrCrCrC | OOO |
| WV- | UUGGUAUGUUCCUGCUUCAU | 822 | rUrUrGrGrUrArUrGrUrUrCrCrUrGrCrU | OOOOOOOOOOOOOOOOOOOO |
| 8234 | CCCCUUCUACAGUGGCCUUAUCCC | | rUrCrArUrCrCrCrCrUrUrCrUrArCrArG | OOOOOOOOOOOOOOOOOOOO |
| | | | rUrGrGrCrCrUrUrArUrCrCrC | OOO |
| WV- | CTGTAGAAAGGCATGAAGCA | 823 | L001m5Ceo*TeoGeoTeoAeo*G*A*A*A* | OXOOOXXXXXXXXXXXOOOX |
| 8235 | | | G*G*C*A*T*G*AeoAeoGeom5Ceo* | |
| | | | Aeo | |
| WV- | CTGTAGAAAGGCATGAAGCA | 824 | L001m5Ceo*RTeoGeoTeoAeo*RG*SA*SA | OROOORSSSSRSSRSSOOOR |
| 8236 | | | *SA*SG*RG*SC*SA*RT*SG* | |
| | | | SAeoAeoGeom5Ceo*RAeo | |
| WV- | CCACTGTAGAAAGGCATGAA | 825 | L001m5Ceo*m5CeoAeom5CeoTeo*G*T*A | OXOOOXXXXXXXXXXXOOOX |
| 8237 | | | *G*A*A*A*G*G*C*AeoTeoGeoAeo* | |
| | | | Aeo | |
| WV- | CCACTGTAGAAAGGCATGAA | 826 | L001m5Ceo*Rm5CeoAeom5CeoTeo*RG* | OROOORSSSSSSSRSSOOOR |
| 8238 | | | ST*SA*SG*SA*SA*SA*SG*RG*SC* | |
| | | | SAeoTeoGeoAeo*RAeo | |
| WV- | CTGTAGAAAGGCATGAAGCA | 827 | L001m5Ceo*Teo*Geo*Teo*Aeo*G*A* | OXXXXXXXXXXXXXXXXXXX |
| 8239 | | | A*A*G*G*C*A*T*G*Aeo*Aeo*Geo | |
| | | | *m5Ceo*Aeo | |
| WV- | CTGTAGAAAGGCATGAAGCA | 828 | L001m5Ceo*RTeo*RGeo*RTeo*RAeo* | ORRRRRSSSSRSSRSSRRRR |
| 8240 | | | RG*SA*SA*SA*SG*RG*SC*SA*RT* | |
| | | | SG*SAeo*RAeo*RGeo*Rm5Ceo*RAeo | |
| WV- | CCUUCCCUGAAGGUUCCUCC | 829 | POmC*fC*mUfU*mCfC*mCfU*mGfA* | XXOXOXOXOXOXOXXXXXX |
| 2477 | | | mAfG*mGfU*mU*fC*mC*fU*mC*mC | |
| WV- | TGCCACUGUAGAAAGGCAUGATU | 830 | PO5MRdT*SfG*SmCfC*SmAfC*SmUfG*SmUfA*SmGfA* | SSOSOSOSOSOSO |
| 8241 | | | SmAfA*SmG*SfG*SmC*SfA*SmU*SfG*SmA*STGaNC6T* | SSSSSSSSS |
| | | | SmU | |
| WV- | CTGTAGAAAGGCATGAAGCA | 831 | mC*STeomGTeomA*SG*SA*SA*SA*SG*RG*SC*SA*RT* | SOOOSSSSSRSSRSS |
| 8244 | | | SG*SmAmAmGmC*SmA | OOOS |
| WV- | CTGTAGAAAGGCATGAAGCA | 832 | m5Ceo*RTeoGeoTeoAeo*RG*SA*SA*SA*SG*RG*SC*SA* | ROOORSSSSRSSRSS |
| 8245 | | | RT*SG*SAeoAeoGeom5Ceo*RAeo | OOOR |
| WV- | CTGTAGAAAGGCATGAAGCA | 833 | m5IC*STeomGTeomA*SG*SA*SA*SA*SG*RG*SC*SA*RT | SOOOSSSSSRSSRSS |
| 8246 | | | *SG*SmAmAmGmC*SIA | OOOS |
| WV- | CTGTAGAAAGGCATGAAGCA | 834 | m5IC*RTeoGeoTeoAeo*RG*SA*SA*SA*SG*RG*SC*SA*RT | ROOORSSSSRSSRSS |
| 8247 | | | *SG*SAeoAeoGeom5Ceo*RIA | OOOR |
| WV- | CCACUGTAGAAAGGCATGAA | 835 | mC*Sm5CeomAm5CeomU*SG*ST*SA*SG*SA*SA*SA*SG* | SOOOSSSSSSSSRSS |
| 8248 | | | RG*SC*SmATeomGmA*SmA | OOOS |
| WV- | CCACTGTAGAAAGGCATGAA | 836 | m5Ceo*Rm5CeoAeom5CeoTeo*RG*ST*SA*SG*SA*SA*SA* | ROOORSSSSSSSRSS |
| 8249 | | | SG*RG*SC*SAeoTeoGeoAeo*RAeo | OOOR |
| WV- | CCACUGTAGAAAGGCATGAA | 837 | m5IC*Sm5CeomAm5CeomU*SG*ST*SA*SG*SA*SA*SA*SG | SOOOSSSSSSSSRSS |
| 8250 | | | *RG*SC*SmATeomGmA*SIA | OOOS |
| WV- | CCACTGTAGAAAGGCATGAA | 838 | m5IC*Rm5CeoAeom5CeoTeo*RG*ST*SA*SG*SA*SA*SA* | ROOORSSSSSSSRSS |
| 8251 | | | SG*RG*SC*SAeoTeoGeoAeo*RIA | OOOR |
| WV- | CTGTAGAAAGGCATGAAGCA | 839 | m5Ceo*RTeo*RGeo*RTeo*RAeo*RG*SA*SA*SA*SG*RG | RRRRRSSSSRSS |
| 8252 | | | *SC*SA*RT*SG*SAeo*RAeo*RGeo*Rm5Ceo*RAeo | RSSRRRR |
| WV- | CCACTGTAGAAAGGCATGAA | 840 | m5Ceo*Rm5Ceo*RAeo*Rm5Ceo*RTeo*RG*ST*SA*SG*SA | RRRRRSSSSSSS |
| 8253 | | | *SA*SA*SG*RG*SC*SAeo*RTeo*RGeo*RAeo*RAeo | RSSRRRR |
| WV- | TGCCACUGUAGAAAGGCAUTU | 841 | VPT*fG*mCfC*mAfC*mUfG*mUfA*mGfA*mAfA* | XXOXOXOXOXOXOX |
| 8255 | TTTTTGGTAATCCACTTTCAGAGG | | mGfGmCfAmU*AMC6T*mUTTTTTeo*Geo*Geo*Teo*Aeo*A | OOOOXXOOOOO |
| | | | *T*m5C*m5C*A*m5C*T*T*T*m5C*Aeo*Geo*Aeo* | XXXXXXXXXX |
| | | | Geo*Geo | XXXXXXXXX |
| WV- | GGACCTGAGGATGGACCGCG | 842 | L001mG*SmG*SmA*SmC*SmC*ST*SG*RA*SG*SG*RA* | OSSSSSSRSSRSSR |
| 8256 | | | ST*SG*RG*SA*SmC*SmC*SmG*SmC*SmG | SSSSSS |
| WV- | GGACCTGAGGATGGACCGCG | 843 | L001mG*SmG*SmA*SmC*SmC*ST*SG*RA*SG*SG*RA* | OSSSSSSRSSRSS |
| 8257 | | | ST*SG*RG*SA*Sm5Ceo*Rm5Ceo*RGeo*Rm5Ceo*RGeo | RSSRRRR |
| WV- | GGACCTGAGGATGGACCGCG | 844 | L001mG*SmG*SmA*SmC*SmC*ST*SG*RA*SG*SG*SA* | OSSSSSSRSSSSSR |
| 8258 | | | ST*SG*RG*SA*SmC*SmC*SmG*SmC*SmG | SSSSSS |
| WV- | GGACCTGAGGATGGACCGCG | 845 | L001mG*SmG*SmA*SmC*SmC*ST*SG*RA*SG*SG*SA* | OSSSSSSRSSSSS |
| 8259 | | | ST*SG*RG*SA*Sm5Ceo*Rm5Ceo*RGeo*Rm5Ceo*RGeo | RSSRRRR |
| WV- | TGCCACUGUAGAAAGGCAUGATU | 846 | PO5MRdT*SfG*SmCfC*SmAfC*SmUfG*SmUfA*SmGfA* | SSOSOSOSOSOSO |
| 8260 | | | SmAfA*SmG*SfG*SmC*SfA*SmU*SfG*SmA*SAMC6T* | SSSSSSSSS |
| | | | SmU | |
| WV- | TGCCACUGUAGAAAGGCAUTU | 847 | 5MSdT*fG*mCfC*mAfC*mUfG*mUfA*mGfA*mAfA* | XXOXOXOXOXOXOX |
| 8263 | | | mGfGmCfAmU*T*mU | OOOOXX |
| WV- | TGCCACUGUAGAAAGGCAUTU | 848 | PO5MSdT*fG*mCfC*mAfC*mUfG*mUfA*mGfA*mAfA* | XXOXOXOXOXOXOX |
| 8264 | | | mGfGmCfAmU*T*mU | OOOOXX |
| WV- | TGCCACUGUAGAAAGGCAUTU | 849 | PS5MSdT*fG*mCfC*mAfC*mUfG*mUfA*mGfA*mAfA* | XXOXOXOXOXOXOX |
| 8265 | | | mGfGmCfAmU*T*mU | OOOOXX |
| WV- | TGCCACUGUAGAAAGGCAUTU | 850 | PH5MSdT*fG*mCfC*mAfC*mUfG*mUfA*mGfA*mAfA* | XXOXOXOXOXOXOX |
| 8266 | | | mGfGmCfAmU*T*mU | OOOOXX |
| WV- | TGCCACUGUAGAAAGGCAUTU | 851 | 5MRdT*fG*mCfC*mAfC*mUfG*mUfA*mGfA*mAfA* | XXOXOXOXOXOXOX |
| 8267 | | | mGfGmCfAmU*T*mU | OOOOXX |
| WV- | TGCCACUGUAGAAAGGCAUTU | 852 | PO5MRdT*fG*mCfC*mAfC*mUfG*mUfA*mGfA*mAfA* | XXOXOXOXOXOXOX |
| 8268 | | | mGfGmCfAmU*T*mU | OOOOXX |
| WV- | TGCCACUGUAGAAAGGCAUTU | 853 | PS5MRdT*fG*mCfC*mAfC*mUfG*mUfA*mGfA*mAfA* | XXOXOXOXOXOXOX |
| 8269 | | | mGfGmCfAmU*T*mU | OOOOXX |
| WV- | TGCCACUGUAGAAAGGCAUTU | 854 | PH5MRdT*fG*mCfC*mAfC*mUfG*mUfA*mGfA*mAfA* | XXOXOXOXOXOXOX |
| 8270 | | | mGfGmCfAmU*T*mU | OOOOXX |
| WV- | TGCCACUGUAGAAAGGCAUGATU | 855 | 5MSdT*fG*mCfC*mAfC*mUfG*mUfA*mGfA*mAfA* | XXOXOXOXOXOXOX |
| 8271 | | | mGfGmCfAmUfGmA*T*mU | OOOOOOXX |
| WV- | TGCCACUGUAGAAAGGCAUGATU | 856 | PO5MSdT*fG*mCfC*mAfC*mUfG*mUfA*mGfA*mAfA* | XXOXOXOXOXOXOX |
| 8272 | | | mGfGmCfAmUfGmA*T*mU | OOOOOOXX |
| WV- | TGCCACUGUAGAAAGGCAUGATU | 857 | PS5MSdT*fG*mCfC*mAfC*mUfG*mUfA*mGfA*mAfA* | XXOXOXOXOXOXOX |
| 8273 | | | mGfGmCfAmUfGmA*T*mU | OOOOOOXX |
| WV- | TGCCACUGUAGAAAGGCAUGATU | 858 | PH5MSdT*fG*mCfC*mAfC*mUfG*mUfA*mGfA*mAfA* | XXOXOXOXOXOXOX |
| 8274 | | | mGfGmCfAmUfGmA*T*mU | OOOOOOXX |
| WV- | TGCCACUGUAGAAAGGCAUGATU | 859 | 5MRdT*fG*mCfC*mAfC*mUfG*mUfA*mGfA*mAfA* | XXOXOXOXOXOXOX |
| 8275 | | | mGfGmCfAmUfGmA*T*mU | OOOOOOXX |
| WV- | TGCCACUGUAGAAAGGCAUGATU | 860 | PO5MRdT*fG*mCfC*mAfC*mUfG*mUfA*mGfA*mAfA* | XXOXOXOXOXOXOX |
| 8276 | | | mGfGmCfAmUfGmA*T*mU | OOOOOOXX |
| WV- | TGCCACUGUAGAAAGGCAUGATU | 861 | PS5MRdT*fG*mCfC*mAfC*mUfG*mUfA*mGfA*mAfA* | XXOXOXOXOXOXOX |
| 8277 | | | mGfGmCfAmUfGmA*T*mU | OOOOOOXX |
| WV- | TGCCACUGUAGAAAGGCAUGATU | 862 | PH5MRdT*fG*mCfC*mAfC*mUfG*mUfA*mGfA*mAfA* | XXOXOXOXOXOXOX |
| 8278 | | | mGfGmCfAmUfGmA*T*mU | OOOOOOXX |
| WV- | CCACTGTAGAAAGGCATGAA | 863 | Mod001L001m5Ceo*m5Ceo*Aeo*m5Ceo*Teo*G*T*A*G* | OXXXXXXXXXX |
| 8279 | | | A*A*A*G*G*C*Aeo*Teo*Geo*Aeo*Aeo | XXXXXXXXX |
| WV- | CCACTGTAGAAAGGCATGAA | 864 | Mod001L001m5Ceo*Rm5Ceo*RAeo*Rm5Ceo*RTeo*RG*ST* | ORRRRRSSSSSSS |
| 8280 | | | SA*SG*SA*SA*SA*SG*RG*SC*SAeo*RTeo*RGeo*RAeo | RSSRRRR |
| | | | *RAeo | |
| WV- | CCACTGTAGAAAGGCATGAA | 865 | L001m5Ceo*m5Ceo*Aeo*m5Ceo*Teo*G*T*A*G*A*A* | OXXXXXXXXXX |
| 8323 | | | A*G*G*C*Aeo*Teo*Geo*Aeo*Aeo | XXXXXXXXX |
| WV- | CCACTGTAGAAAGGCATGAA | 866 | L001m5Ceo*Rm5Ceo*RAeo*Rm5Ceo*RTeo*RG*ST*SA*SG | ORRRRRSSSSSSS |
| 8324 | | | *SA*SA*SA*SG*RG*SC*SAeo*RTeo*RGeo*RAeo*RAeo | RSSRRRR |
| WV- | TGCCACUGUAGAAAGGCAUTU | 867 | T*fG*mCmC*mAmC*mUmG*mUmA*mGmA*mAfA* | XXOXOXOXOXOXOX |
| 8436 | | | mGmGmCmAmU*T*mU | OOOOXX |
| WV- | TGCCACUGUAGAAAGGCAUGATU | 868 | T*fG*mCmC*mAmC*mUmG*mUmA*mGmA*mAfA* | XXOXOXOXOXOXOX |
| 8437 | | | mGmGmCmAmUmG*mA*T*mU | OOOOOXXX |
| WV- | TGCCACUGUAGAAAGGCAUTU | 869 | T*fG*mCmC*mAmC*mUmG*mUmA*mGmA*mAfA*mG* | XXOXOXOXOXOXO |
| 8438 | | | mG*mC*mA*mU*T*mU | XXXXXXX |
| WV- | TGCCACUGUAGAAAGGCAUGATU | 870 | T*fG*mCmC*mAmC*mUmG*mUmA*mGmA*mAfA*mG* | XXOXOXOXOXOXO |
| 8439 | | | mG*mC*mA*mU*mG*mA*T*mU | XXXXXXXXX |
| WV- | TGCCACUGUAGAAAGGCAUTU | 871 | T*mG*mCmC*mAmC*mUmG*mUmA*mGmA*mAmA* | XXOXOXOXOXOXOX |
| 8440 | | | mGmGmCmAmU*T*mU | OOOOXX |
| WV- | TGCCACUGUAGAAAGGCAUGATU | 872 | T*mG*mCmC*mAmC*mUmG*mUmA*mGmA*mAmA* | XXOXOXOXOXOXOX |
| 8441 | | | mGmGmCmAmUmG*mA*T*mU | OOOOOXXX |
| WV- | TGCCACUGUAGAAAGGCAUTU | 873 | T*mG*mCmC*mAmC*mUmG*mUmA*mGmA*mAmA*mG | XXOXOXOXOXOXO |
| 8442 | | | *mG*mC*mA*mU*T*mU | XXXXXXX |
| WV- | TGCCACUGUAGAAAGGCAUGATU | 874 | T*mG*mCmC*mAmC*mUmG*mUmA*mGmA*mAmA*mG | XXOXOXOXOXOXO |
| 8443 | | | *mG*mC*mA*mU*mG*mA*T*mU | XXXXXXXXX |
| WV- | CTGTAGAAAGGCATGAAGCA | 875 | Mod001L001m5Ceo*RTeoGeoTeoAeo*RG*SA*SA*SA*SG* | OROOORSSSSRSSR |
| 8558 | | | RG*SC*SA*RT*SG*SAeo*SAeo*SGeo*Sm5Ceo*SAeo | SSSSSS |
| WV- | CCACTGTAGAAAGGCATGAA | 876 | Mod001L001m5Ceo*Rm5CeoAeom5CeoTeo*RG*ST*SA*SG* | OROOORSSSSSSSR |
| 8559 | | | SA*SA*SA*SG*RG*SC*SAeo*STeo*SGeo*SAeo*SAeo | SSSSSS |
| WV- | CTGTAGAAAGGCATGAAGCA | 877 | Mod001L001m5Ceo*RTeoGeoTeoAeo*RG*SA*SA*SA*SG* | OROOORSSSSRSSR |
| 8560 | | | RG*SC*SA*RT*SG*SmA*SmA*SmG*SmC*SmA | SSSSSS |
| WV- | CCACTGTAGAAAGGCAUGAA | 878 | Mod001L001m5Ceo*Rm5CeoAeom5CeoTeo*RG*ST*SA*SG* | OROOORSSSSSSSR |
| 8561 | | | SA*SA*SA*SG*RG*SC*SmA*SmU*SmG*SmA*SmA | SSSSSS |
| WV- | CTGTAGAAAGGCATGAAGCA | 879 | Mod001L001mC*STeoGeoTeomA*SG*SA*SA*SA*SG*RG* | OSOOOSSSSSRSSR |
| 8562 | | | SC*SA*RT*SG*SAeo*SAeo*SGeo*5m5Ceo*SAeo | SSSSSS |
| WV- | CCACUGTAGAAAGGCATGAA | 880 | Mod001L001mC*Sm5CeoAeom5CeomU*SG*ST*SA*SG*SA* | OSOOOSSSSSSSSR |
| 8563 | | | SA*SA*SG*RG*SC*SAeo*STeo*SGeo*SAeo*SAeo | SSSSSS |
| WV- | CTGTAGAAAGGCATGAAGCA | 881 | Mod001L001mC*STeoGeoTeomA*SG*SA*SA*SA*SG*RG* | OSOOOSSSSSRSSR |
| 8564 | | | SC*SA*RT*SG*SmA*SmA*SmG*SmC*SmA | SSSSSS |
| WV- | CCACUGTAGAAAGGCAUGAA | 882 | Mod001L001mC*Sm5CeoAeom5CeomU*SG*ST*SA*SG*SA* | OSOOOSSSSSSSSR |
| 8565 | | | SA*SA*SG*RG*SC*SmA*SmU*SmG*SmA*SmA | SSSSSS |
| WV- | CTGTAGAAAGGCATGAAGCA | 883 | Mod001L001m5Ceo*STeoGeoTeoAeo*SG*SA*SA*SA*SG* | OSOOOSSSSSRSSRSS |
| 8566 | | | RG*SC*SA*RT*SG*SAeoAeoGeom5Ceo*SAeo | OOOS |
| WV- | CCACTGTAGAAAGGCATGAA | 884 | Mod001L001m5Ceo*Sm5CeoAeom5CeoTeo*SG*ST*SA*SG* | OSOOOSSSSSSSSRSS |
| 8567 | | | SA*SA*SA*SG*RG*SC*SAeoTeoGeoAeo*SAeo | OOOS |
| WV- | CTGTAGAAAGGCATGAAGCA | 885 | Mod001L001mC*STeoGeoTeomA*SG*SA*SA*SA*SG*SG* | OSOOOSSSSSSSSR |
| 8596 | | | SC*SA*RT*SG*SmA*SmA*SmG*SmC*SmA | SSSSSS |
| WV- | CTGTAGAAAGGCATGAAGCA | 886 | Mod001L001mC*STeoGeoTeomA*SG*SA*SA*SA*SG*RG* | OSOOOSSSSSRSSSSS |
| 8597 | | | SC*SA*ST*SG*SmA*SmA*SmG*SmC*SmA | SSSS |
| WV- | CTGTAGAAAGGCATGAAGCA | 887 | Mod001L001m5Ceo*STeoGeoTeoAeo*SG*SA*SA*SA*SG*SG | OSOOOSSSSSSSSRSS |
| 8598 | | | *SC*SA*RT*SG*SAeoAeoGeom5Ceo*SAeo | OOOS |
| WV- | CTGTAGAAAGGCATGAAGCA | 888 | Mod001L001m5Ceo*STeoGeoTeoAeo*SG*SA*SA*SA*SG* | OSOOOSSSSSRSSSSS |
| 8599 | | | RG*SC*SA*ST*SG*SAeoAeoGeom5Ceo*SAeo | OOOS |
| WV- | CTGTAGAAAGGCATGAAGCA | 889 | Mod001L001mC*TeoGeoTeomA*G*A*A*A*G*G*C*A*T | OXOOOXXXXXXXXXX |
| 8600 | | | *G*mA*mA*mG*mC*mA | XXXXX |
| WV- | CTGTAGAAAGGCATGAAGCA | 890 | mC*STeoGeoTeomA*SG*SA*SA*SA*SG*RG*SC*SA*RT* | SOOOSSSSSRSSR |
| 8601 | | | SG*SmA*SmA*SmG*SmC*SmA | SSSSSS |
| WV- | CCACUGTAGAAAGGCAUGAA | 891 | mC*Sm5CeoAeom5CeomU*SG*ST*SA*SG*SA*SA*SA*SG | SOOOSSSSSSSSR |
| 8602 | | | *RG*SC*SmA*SmU*SmG*SmA*SmA | SSSSSS |
| WV- | CTGTAGAAAGGCATGAAGCA | 892 | m5Ceo*STeoGeoTeoAeo*SG*SA*SA*SA*SG*RG*SC*SA* | SOOOSSSSSRSSRSS |
| 8603 | | | RT*SG*SAeoAeoGeom5Ceo*SAeo | OOOS |
| WV- | CCACTGTAGAAAGGCATGAA | 893 | m5Ceo*Sm5CeoAeom5CeoTeo*SG*ST*SA*SG*SA*SA*SA* | SOOOSSSSSSSSRSS |
| 8604 | | | SG*RG*SC*SAeoTeoGeoAeo*SAeo | OOOS |
| WV- | CTGTAGAAAGGCATGAAGCA | 894 | mC*STeoGeoTeomA*SG*SA*SA*SA*SG*SG*SC*SA*RT* | SOOOSSSSSSSSR |
| 8605 | | | SG*SmA*SmA*SmG*SmC*SmA | SSSSSS |
| WV- | CTGTAGAAAGGCATGAAGCA | 895 | mC*STeoGeoTeomA*SG*SA*SA*SA*SG*RG*SC*SA*ST* | SOOOSSSSSRSSSSS |
| 8606 | | | SG*SmA*SmA*SmG*SmC*SmA | SSSS |
| WV- | CTGTAGAAAGGCATGAAGCA | 896 | m5Ceo*STeoGeoTeoAeo*SG*SA*SA*SA*SG*SG*SC*SA* | SOOOSSSSSSSSRSS |
| 8607 | | | RT*SG*SAeoAeoGeom5Ceo*SAeo | OOOS |
| WV- | CTGTAGAAAGGCATGAAGCA | 897 | m5Ceo*STeoGeoTeoAeo*SG*SA*SA*SA*SG*RG*SC*SA* | SOOOSSSSSRSSSSS |
| 8608 | | | ST*SG*SAeoAeoGeom5Ceo*SAeo | OOOS |
| WV- | CTGTAGAAAGGCATGAAGCA | 898 | mC*TeoGeoTeomA*G*A*A*A*G*G*C*A*T*G*mA* | XOOOXXXXXXXXXX |
| 8609 | | | mA*mG*mC*mA | XXXXX |
| WV- | CTGTAGAAAGGCATGAAGCA | 899 | L001mC*STeoGeoTeomA*SG*SA*SA*SA*SG*RG*SC*SA* | OSOOOSSSSSRSSR |
| 8620 | | | RT*SG*SmA*SmA*SmG*SmC*SmA | SSSSSS |
| WV- | CCACUGTAGAAAGGCAUGAA | 900 | L001mC*Sm5CeoAeom5CeomU*SG*ST*SA*SG*SA*SA*SA | OSOOOSSSSSSSSR |
| 8621 | | | *SG*RG*SC*SmA*SmU*SmG*SmA*SmA | SSSSSS |
| WV- | CTGTAGAAAGGCATGAAGCA | 901 | L001m5Ceo*STeoGeoTeoAeo*SG*SA*SA*SA*SG*RG*SC* | OSOOOSSSSSRSSRSS |
| 8622 | | | SA*RT*SG*SAeoAeoGeom5Ceo*SAeo | OOOS |
| WV- | CCACTGTAGAAAGGCATGAA | 902 | L001m5Ceo*Sm5CeoAeom5CeoTeo*SG*ST*SA*SG*SA*SA* | OSOOOSSSSSSSSRSS |
| 8623 | | | SA*SG*RG*SC*SAeoTeoGeoAeo*SAeo | OOOS |
| WV- | CTGTAGAAAGGCATGAAGCA | 903 | L001mC*STeoGeoTeomA*SG*SA*SA*SA*SG*SG*SC*SA* | OSOOOSSSSSSSSR |
| 8624 | | | RT*SG*SmA*SmA*SmG*SmC*SmA | SSSSSS |
| WV- | CTGTAGAAAGGCATGAAGCA | 904 | L001mC*STeoGeoTeomA*SG*SA*SA*SA*SG*RG*SC*SA* | OSOOOSSSSSRSSSSS |
| 8625 | | | ST*SG*SmA*SmA*SmG*SmC*SmA | SSSS |
| WV- | CTGTAGAAAGGCATGAAGCA | 905 | L001m5Ceo*STeoGeoTeoAeo*SG*SA*SA*SA*SG*SG*SC* | OSOOOSSSSSSSSRSS |
| 8626 | | | SA*RT*SG*SAeoAeoGeom5Ceo*SAeo | OOOS |
| WV- | CTGTAGAAAGGCATGAAGCA | 906 | L001m5Ceo*STeoGeoTeoAeo*SG*SA*SA*SA*SG*RG*SC* | OSOOOSSSSSRSSSSS |
| 8627 | | | SA*ST*SG*SAeoAeoGeom5Ceo*SAeo | OOOS |
| WV- | CTGTAGAAAGGCATGAAGCA | 907 | L001mC*TeoGeoTeomA*G*A*A*A*G*G*C*A*T*G*mA | OXOOOXXXXXXXXXX |
| 8628 | | | *mA*mG*mC*mA | XXXXX |
| WV- | CCACUGTAGAAAGGCAUGAA | 908 | Mod001L001mC*m5CeoAeom5CeomU*G*T*A*G*A*A*A* | OXOOOXXXXXXXXXX |
| 8689 | | | G*G*C*mA*mU*mG*mA*mA | XXXXX |
| WV- | CCACUGTAGAAAGGCAUGAA | 909 | mC*m5CeoAeom5CeomU*G*T*A*G*A*A*A*G*G*C* | XOOOXXXXXXXXXX |
| 8690 | | | mA*mU*mG*mA*mA | XXXXX |
| WV- | CCACUGTAGAAAGGCAUGAA | 910 | L001mC*m5CeoAeom5CeomU*G*T*A*G*A*A*A*G*G* | OXOOOXXXXXXXXXX |
| 8697 | | | C*mA*mU*mG*mA*mA | XXXXX |
| WV- | TGCCACUGUAGAAAGGCAUGATU | 911 | PS5MRdT*SfG*SmCfC*SmAfC*SmUfG*SmUfA*SmGfA* | SSOSOSOSOSOSO |
| 8698 | | | SmAfA*SmG*SfG*SmC*SfA*SmU*SfG*SmA*STGaNC6T* | SSSSSSSSS |
| | | | SmU | |
| WV- | TGCCACUGUAGAAAGGCAUGATU | 912 | PS5MRdT*SfG*SmCfC*SmAfC*SmUfG*SmUfA*SmGfA* | SSOSOSOSOSOSO |
| 8699 | | | SmAfA*SmG*SfG*SmC*SfA*SmU*SfG*SmA*SAMC6T* | SSSSSSSSS |
| | | | SmU | |
| WV- | TGCCACUGUAGAAAGGCAUGATU | 913 | 5MRdT*SfG*SmCfC*SmAfC*SmUfG*SmUfA*SmGfA*SmAfA | SSOSOSOSOSOSO |
| 8700 | | | *SmG*SfG*SmC*SfA*SmU*SfG*SmA*STGaNC6T*SmU | SSSSSSSSS |
| WV- | TGCCACUGUAGAAAGGCAUGATU | 914 | 5MRdT*SfG*SmCfC*SmAfC*SmUfG*SmUfA*SmGfA*SmAfA | SSOSOSOSOSOSO |
| 8701 | | | *SmG*SfG*SmC*SfA*SmU*SfG*SmA*SAMC6T*SmU | SSSSSSSSS |
| WV- | CUGCUUCAUGCCUUUCUACAGUGG | 915 | rCrUrGrCrUrUrCrArUrGrCrCrUrUrUrCrUrArCrArGrUrG | OOOOOOOOOO |
| 8807 | | | rG | OOOOOOOOOOOOO |
| WV- | CUGCUUCAUCCCCUUCUACAGUGG | 916 | rCrUrGrCrUrUrCrArUrCrCrCrCrUrUrCrUrArCrArGrU | OOOOOOOOOO |
| 8808 | | | rGrG | OOOOOOOOOOOOO |
| WV- | UGTAGAAAGGCATGAAGCAG | 917 | mU*GeoTeoAeomG*A*A*A*G*G*C*A*T*G*A*mA* | XOOOXXXXXXXXXX |
| 8843 | | | mG*mC*mA*mG | XXXXX |
| WV- | UGUAGAAAGGCATGAAGCAG | 918 | mU*mG*mU*mA*mG*A*A*A*G*G*C*A*T*G*A* | XXXXXXXXXXXXXXX |
| 8844 | | | mAGeom5CeoAeo*mG | OOOX |
| WV- | TGTAGAAAGGCATGAAGCAG | 919 | Teo*GeoTeoAeoGeo *A*A*A*G*G*C*A*T*G*A*mA* | XOOOXXXXXXXXXX |
| 8845 | | | mG*mC*mA*mG | XXXXX |
| WV- | UGUAGAAAGGCATGAAGCAG | 920 | mU*mG*mU*mA*mG*A*A*A*G*G*C*A*T*G*A* | XXXXXXXXXXXXXXX |
| 8846 | | | AeoGeom5CeoAeo*Geo | OOOX |
| WV- | CUGUAGAAAGGCATGAAGCA | 921 | mC*mU*mG*mU*mA*G*A*A*A*G*G*C*A*T*G* | XXXXXXXXXXXXXXX |
| 8847 | | | mAAeoGeom5Ceo*mA | OOOX |
| WV- | CTGTAGAAAGGCATGAAGCA | 922 | m5Ceo*TeoGeoTeoAeo*G*A*A*A*G*G*C*A*T*G*mA | XOOOXXXXXXXXXX |
| 8848 | | | *mA*mG*mC*mA | XXXXX |
| WV- | CUGUAGAAAGGCATGAAGCA | 923 | mC*mU*mG*mU*mA*G*A*A*A*G*G*C*A*T*G* | XXXXXXXXXXXXXXX |
| 8849 | | | AeoAeoGeom5Ceo*Aeo | OOOX |
| WV- | ACTGUAGAAAGGCATGAAGC | 924 | mA*m5CeoTeoGeomU*A*G*A*A*A*G*G*C*A*T*mG | XOOOXXXXXXXXXX |
| 8850 | | | *mA*mA*mG*mC | XXXXX |
| WV- | ACUGUAGAAAGGCATGAAGC | 925 | mA*mC*mU*mG*mU*A*G*A*A*A*G*G*C*A*T* | XXXXXXXXXXXXXXX |
| 8851 | | | mGAeoAeoGeo*mC | OOOX |
| WV- | ACTGTAGAAAGGCATGAAGC | 926 | Aeo*m5CeoTeoGeoTeo*A*G*A*A*A*G*G*C*A*T*mG | XOOOXXXXXXXXXX |
| 8852 | | | *mA*mA*mG*mC | XXXXX |
| WV- | ACUGUAGAAAGGCATGAAGC | 927 | mA*mC*mU*mG*mU*A*G*A*A*A*G*G*C*A*T* | XXXXXXXXXXXXXXX |
| 8853 | | | GeoAeoAeoGeo*m5Ceo | OOOX |
| WV- | CACTGTAGAAAGGCAUGAAG | 928 | mC*Aeom5CeoTeomG*T*A*G*A*A*A*G*G*C*A*mU | XOOOXXXXXXXXXX |
| 8854 | | | *mG*mA*mA*mG | XXXXX |
| WV- | CACUGTAGAAAGGCAUGAAG | 929 | mC*mA*mC*mU*mG*T*A*G*A*A*A*G*G*C*A* | XXXXXXXXXXXXXXX |
| 8855 | | | mUGeoAeoAeo*mG | OOOX |
| WV- | CACTGTAGAAAGGCAUGAAG | 930 | m5Ceo*Aeom5CeoTeoGeo*T*A*G*A*A*A*G*G*C*A* | XOOOXXXXXXXXXX |
| 8856 | | | mU*mG*mA*mA*mG | XXXXX |
| WV- | CACUGTAGAAAGGCATGAAG | 931 | mC*mA*mC*mU*mG*T*A*G*A*A*A*G*G*C*A* | XXXXXXXXXXXXXXX |
| 8857 | | | TeoGeoAeoAeo*Geo | OOOX |
| WV- | CCACUGTAGAAAGGCATGAA | 932 | mC*mC*mA*mC*mU*G*T*A*G*A*A*A*G*G*C* | XXXXXXXXXXXXXXX |
| 8858 | | | mATeoGeoAeo*mA | OOOX |
| WV- | CCACTGTAGAAAGGCAUGAA | 933 | m5Ceo*m5CeoAeom5CeoTeo*G*T*A*G*A*A*A*G*G*C | XOOOXXXXXXXXXX |
| 8859 | | | *mA*mU*mG*mA*mA | XXXXX |
| WV- | CCACUGTAGAAAGGCATGAA | 934 | mC*mC*mA*mC*mU*G*T*A*G*A*A*A*G*G*C* | XXXXXXXXXXXXXXX |
| 8860 | | | AeoTeoGeoAeo*Aeo | OOOX |
| WV- | TGCCACUGUAGAAAGGCAUGATU | 935 | T*SfG*SmCfC*SmAfC*SmUfG*SmUmA*SmGmA*SmAfA* | SSOSOSOSOSOSO |
| 9400 | | | SmG*SmG*SmC*SmA*SmU*SmG*SmA*STGaNC6T*SmU | SSSSSSSSS |
| WV- | TGCCACUGUAGAAAGGCAUGATU | 936 | 5MRdT*SfG*SmCfC*SmAfC*SmUfG*SmUmA*SmGmA* | SSOSOSOSOSOSO |
| 9401 | | | SmAfA*SmG*SmG*SmC*SmA*SmU*SmG*SmA*STGaNC6T | SSSSSSSSS |
| | | | *SmU | |
| WV- | TGCCACUGUAGAAAGGCAUGATU | 937 | PO5MRdT*SfG*SmCfC*SmAfC*SmUfG*SmUmA*SmGmA* | SSOSOSOSOSOSO |
| 9402 | | | SmAfA*SmG*SmG*SmC*SmA*SmU*SmG*SmA*STGaNC6T | SSSSSSSSS |
| | | | *SmU | |
| WV- | TGCCACUGUAGAAAGGCAUGATU | 938 | PS5MRdT*SfG*SmCfC*SmAfC*SmUfG*SmUmA*SmGmA* | SSOSOSOSOSOSO |
| 9403 | | | SmAfA*SmG*SmG*SmC*SmA*SmU*SmG*SmA*STGaNC6T | SSSSSSSSS |
| | | | *SmU | |
| WV- | TGCCACUGUAGAAAGGCAUGATU | 939 | T*SfG*SmCmC*SmAmC*SmUmG*SmUmA*SmGmA*SmAfA | SSOSOSOSOSOSO |
| 9404 | | | *SmG*SmG*SmC*SmA*SmU*SmG*SmA*STGaNC6T*SmU | SSSSSSSSS |
| WV- | TGCCACUGUAGAAAGGCAUGATU | 940 | 5MRdT*SfG*SmCmC*SmAmC*SmUmG*SmUmA*SmGmA* | SSOSOSOSOSOSO |
| 9405 | | | SmAfA*SmG*SmG*SmC*SmA*SmU*SmG*SmA*STGaNC6T | SSSSSSSSS |
| | | | *SmU | |
| WV- | TGCCACUGUAGAAAGGCAUGATU | 941 | PO5MRdT*SfG*SmCmC*SmAmC*SmUmG*SmUmA*SmGmA | SSOSOSOSOSOSO |
| 9406 | | | *SmAfA*SmG*SmG*SmC*SmA*SmU*SmG*SmA* | SSSSSSSSS |
| | | | STGaNC6T*SmU | |
| WV- | TGCCACUGUAGAAAGGCAUGATU | 942 | PS5MRdT*SfG*SmCmC*SmAmC*SmUmG*SmUmA*SmGmA* | SSOSOSOSOSOSO |
| 9407 | | | SmAfA*SmG*SmG*SmC*SmA*SmU*SmG*SmA*STGaNC6T | SSSSSSSSS |
| | | | *SmU | |
| WV- | TGTAGAAAGGGATGAAGCAG | 943 | Teo*Geo*Teo*Aeo*Geo*A*A*A*G*G*G*A*T*G*A* | XXXXXXXXXX |
| 9431 | | | Aeo*Geo*m5Ceo*Aeo*Geo | XXXXXXXXX |
| WV- | CTGTAGAAAGGGATGAAGCA | 944 | m5Ceo*Teo*Geo*Teo*Aeo*G*A*A*A*G*G*G*A*T* | XXXXXXXXXX |
| 9432 | | | G*Aeo*Aeo*Geo*m5Ceo*Aeo | XXXXXXXXX |
| WV- | ACTGTAGAAAGGGATGAAGC | 945 | Aeo*m5Ceo*Teo*Geo*Teo*A*G*A*A*A*G*G*G*A* | XXXXXXXXXX |
| 9433 | | | T*Geo*Aeo*Aeo*Geo*m5Ceo | XXXXXXXXX |
| WV- | CACTGTAGAAAGGGATGAAG | 946 | m5Ceo*Aeo*m5Ceo*Teo*Geo*T*A*G*A*A*A*G*G* | XXXXXXXXXX |
| 9434 | | | G*A*Teo*Geo*Aeo*Aeo*Geo | XXXXXXXXX |
| WV- | CCACTGTAGAAAGGGATGAA | 947 | m5Ceo*m5Ceo*Aeo*m5Ceo*Teo*G*T*A*G*A*A*A*G | XXXXXXXXXX |
| 9435 | | | *G*G*Aeo*Teo*Geo*Aeo*Aeo | XXXXXXXXX |
| WV- | TGTAGAAAGGGATGAAGCAG | 948 | Teo*GeoTeoAeoGeo*A*A*A*G*G*G*A*T*G*A* | XOOOXXXXXXXXXXX |
| 9436 | | | AeoGeom5CeoAeo*Geo | OOOX |
| WV- | CTGTAGAAAGGGATGAAGCA | 949 | m5Ceo*TeoGeoTeoAeo*G*A*A*A*G*G*G*A*T*G* | XOOOXXXXXXXXXXX |
| 9437 | | | AeoAeoGeom5Ceo*Aeo | OOOX |
| WV- | ACTGTAGAAAGGGATGAAGC | 950 | Aeo*m5CeoTeoGeoTeo*A*G*A*A*A*G*G*G*A*T* | XOOOXXXXXXXXXXX |
| 9438 | | | GeoAeoAeoGeo*m5Ceo | OOOX |
| WV- | CACTGTAGAAAGGGATGAAG | 951 | m5Ceo*Aeom5CeoTeoGeo*T*A*G*A*A*A*G*G*G*A* | XOOOXXXXXXXXXXX |
| 9439 | | | TeoGeoAeoAeo*Geo | OOOX |
| WV- | CCACTGTAGAAAGGGATGAA | 952 | m5Ceo*m5CeoAeom5CeoTeo*G*T*A*G*A*A*A*G*G* | XOOOXXXXXXXXXXX |
| 9440 | | | G*AeoTeoGeoAeo*Aeo | OOOX |
| WV- | UGTAGAAAGGGATGAAGCAG | 953 | mU*GeoTeoAeomG*A*A*A*G*G*G*A*T*G*A*mA* | XOOOXXXXXXXXXX |
| 9441 | | | mG*mC*mA*mG | XXXXX |
| WV- | CTGTAGAAAGGGATGAAGCA | 954 | mC*TeoGeoTeomA*G*A*A*A*G*G*G*A*T*G*mA* | XOOOXXXXXXXXXX |
| 9442 | | | mA*mG*mC*mA | XXXXX |
| WV- | ACTGUAGAAAGGGATGAAGC | 955 | mA*m5CeoTeoGeomU*A*G*A*A*A*G*G*G*A*T*mG | XOOOXXXXXXXXXX |
| 9443 | | | *mA*mA*mG*mC | XXXXX |
| WV- | CACTGTAGAAAGGGAUGAAG | 956 | mC*Aeom5CeoTeomG*T*A*G*A*A*A*G*G*G*A*mU | XOOOXXXXXXXXXX |
| 9444 | | | *mG*mA*mA*mG | XXXXX |
| WV- | CCACUGTAGAAAGGGAUGAA | 957 | mC*m5CeoAeom5CeomU*G*T*A*G*A*A*A*G*G*G* | XOOOXXXXXXXXXX |
| 9445 | | | mA*mU*mG*mA*mA | XXXXX |
| WV- | TGCCACUGUAGAAAGGCAUGATU | 958 | T*SfG*SmCfC*SmAfC*SmUfG*SmUmA*SmGmA*SmAfA* | SSOSOSOSOSOSO |
| 9495 | | | SmG*SmG*SmC*SmA*SmU*SmG*SmA*SAMC6T*SmU | SSSSSSSSS |
| WV- | TGCCACUGUAGAAAGGCAUGATU | 959 | 5MRdT*SfG*SmCfC*SmAfC*SmUfG*SmUmA*SmGmA* | SSOSOSOSOSOSO |
| 9496 | | | SmAfA*SmG*SmG*SmC*SmA*SmU*SmG*SmA*SAMC6T* | SSSSSSSSS |
| | | | SmU | |
| WV- | TGCCACUGUAGAAAGGCAUGATU | 960 | PO5M RdT*SfG*SmCfC*SmAfC*SmUfG*SmUmA*SmGmA* | SSOSOSOSOSOSO |
| 9497 | | | SmAfA*SmG*SmG*SmC*SmA*SmU*SmG*SmA*SAMC6T* | SSSSSSSSS |
| | | | SmU | |
| WV- | TGCCACUGUAGAAAGGCAUGATU | 961 | PS5M RdT*SfG*SmCfC*SmAfC*SmUfG*SmUmA*SmGmA* | SSOSOS OSOSOSO |
| 9498 | | | SmAfA*SmG*SmG*SmC*SmA*SmU*SmG*SmA*SAMC6T* | SSSSSSSSS |
| | | | SmU | |
| WV- | TGCCACUGUAGAAAGGCAUGATU | 962 | T*SfG*SmCmC*SmAmC*SmUmG*SmUmA*SmGmA*SmAfA | SSOSOSOSOSOSO |
| 9499 | | | *SmG*SmG*SmC*SmA*SmU*SmG*SmA*SAMC6T*SmU | SSSSSSSSS |
| WV- | TGCCACUGUAGAAAGGCAUGATU | 963 | 5MRdT*SfG*SmCmC*SmAmC*SmUmG*SmUmA*SmGmA* | SSOSOSOSOSOSO |
| 9500 | | | SmAfA*SmG*SmG*SmC*SmA*SmU*SmG*SmA*SAMC6T* | SSSSSSSSS |
| | | | SmU | |
| WV- | TGCCACUGUAGAAAGGCAUGATU | 964 | PO5MRdT*SfG*SmCmC*SmAmC*SmUmG*SmUmA*SmGmA | SSOSOSOSOSOSO |
| 9501 | | | *SmAfA*SmG*SmG*SmC*SmA*SmU*SmG*SmA*SAMC6T | SSSSSSSSS |
| | | | *SmU | |
| WV- | TGCCACUGUAGAAAGGCAUGATU | 965 | PS5MRdT*SfG*SmCmC*SmAmC*SmUmG*SmUmA*SmGmA* | SSOSOSOSOSOSO |
| 9502 | | | SmAfA*SmG*SmG*SmC*SmA*SmU*SmG*SmA*SAMC6T* | SSSSSSSSS |
| | | | SmU | |
| WV- | TGCCACUGUAGAAAGGCAUGATU | 966 | Mod001L001T*SfG*SmCfC*SmAfC*SmUfG*SmUfA*SmGfA* | OSSOSOSOSOSOSO |
| 9550 | | | SmAfA*SmG*SfG*SmC*SfA*SmU*SfG*SmA*ST*SmU | SSSSSSSSS |
| WV- | TGCCACUGUAGAAAGGCAUGATU | 967 | Mod001L0015MRdT*SfG*SmCfC*SmAfC*SmUfG*SmUfA* | OSSOSOSOSOSOSO |
| 9551 | | | SmGfA*SmAfA*SmG*SfG*SmC*SfA*SmU*SfG*SmA*ST* | SSSSSSSSS |
| | | | SmU | |
| WV- | TGCCACUGUAGAAAGGCAUGATU | 968 | Mod001L001T*SfG*SmCmC*SmAmC*SmUmG*SmUmA* | OSSOSOSOSOSOSO |
| 9552 | | | SmGmA*SmAfA*SmG*SmG*SmC*SmA*SmU*SmG*SmA* | SSSSSSSSS |
| | | | ST*SmU | |
| WV- | TGCCACUGUAGAAAGGCAUGATU | 969 | Mod001L0015MRdT*SfG*SmCmC*SmAmC*SmUmG*SmUmA* | OSSOSOSOSOSOSO |
| 9553 | | | SmGmA*SmAfA*SmG*SmG*SmC*SmA*SmU*SmG*SmA* | SSSSSSSSS |
| | | | ST*SmU | |
| WV- | TGCCACUGUAGAAAGGCAUGATU | 970 | 5MRdT*SfG*SmCfC*SmAfC*SmUfG*SmUfA*SmGfA*SmAfA | SSOSOSOSOSOSO |
| 9554 | | | *SmG*SfG*SmC*SfA*SmU*SfG*SmA*ST*SmU | SSSSSSSSS |
| WV- | TGCCACUGUAGAAAGGCAUGATU | 971 | T*SfG*SmCmC*SmAmC*SmUmG*SmUmA*SmGmA*SmAfA | SSOSOSOSOSOSO |
| 9555 | | | *SmG*SmG*SmC*SmA*SmU*SmG*SmA*ST*SmU | SSSSSSSSS |
| WV- | TGCCACUGUAGAAAGGCAUGATU | 972 | 5MRdT*SfG*SmCmC*SmAmC*SmUmG*SmUmA*SmGmA* | SSOSOSOSOSOSO |
| 9556 | | | SmAfA*SmG*SmG*SmC*SmA*SmU*SmG*SmA*ST*SmU | SSSSSSSSS |
| WV- | CTGTAGAAAGGCATGAAGCA | 973 | Mod001L001m5Ceo*STeoGeoTeoAeo*RG*SA*SA*SA*SG* | OSOOORSSSSRSSSSR |
| 9670 | | | RG*SC*SA*ST*SG*RAeoAeoGeom5Ceo*SAeo | OOOS |
| WV- | CTGTAGAAAGGCATGAAGCA | 974 | Mod001L001m5Ceo*STeoGeoTeoAeo*RG*SA*SA*SA*SG* | OSOOORSSSSRSSSSS |
| 9671 | | | RG*SC*SA*ST*SG*SAeoAeoGeom5Ceo*SAeo | OOOS |
| WV- | CTGTAGAAAGGCATGAAGCA | 975 | Mod001L001m5Ceo*STeoGeoTeoAeo*SG*SA*SA*SA*SG* | OSOOOSSSSSRSSSSR |
| 9672 | | | RG*SC*SA*ST*SG*RAeoAeoGeom5Ceo*SAeo | OOOS |
| WV- | CTGTAGAAAGGCATGAAGCA | 976 | Mod001L001m5Ceo*STeoGeoTeoAeo*RG*SA*SA*SA*SG* | OSOOORSSSSRSSRSR |
| 9859 | | | RG*SC*SA*RT*SG*RAeoAeoGeom5Ceo*SAeo | OOOS |
| WV- | CTGTAGAAAGGCATGAAGCA | 977 | Mod001L001mC*TeoGeoTeoAeo*G*A*A*A*G*G*C*A*T | OXOOOXXXXXXXXXX |
| 9860 | | | *G*Aeo*mA*mG*mC*mA | XXXXX |
| WV- | CTGTAGAAAGGCATGAAGCA | 978 | Mod001L001mC*STeoGeoTeoAeo*RG*SA*SA*SA*SG*RG* | OSOOORSSSSRSSRSR |
| 9861 | | | SC*SA*RT*SG*RAeo*SmA*SmG*SmC*SmA | SSSS |
| WV- | CTGTAGAAAGGCATGAAGCA | 979 | Mod001L001mC*STeoGeoTeoAeo*RG*SA*SA*SA*SG*RG* | OSOOORSSSSRSSSSR |
| 9862 | | | SC*SA*ST*SG*RAeo*SmA*SmG*SmC*SmA | SSSS |
| WV- | TGCCACUGUAGAAAGGCAUGATU | 980 | VPT*SfG*SmCfC*SmAfC*SmUfG*SmUmA*SmGmA*SmAfA* | SSOSOSOSOSOSO |
| 9866 | | | SmG*SmG*SmC*SmA*SmU*SmG*SmA*STGaNC6T*SmU | SSSSSSSSS |
| WV- | TGCCACUGUAGAAAGGCAUGATU | 981 | VPT*SfG*SmCmC*SmAmC*SmUmG*SmUmA*SmGmA* | SSOSOS OSOSOSO |
| 9867 | | | SmAfA*SmG*SmG*SmC*SmA*SmU*SmG*SmA*STGaNC6T | SSSSSSSSS |
| | | | *SmU | |
| WV- | CTGTAGAAAGGCATGAAGCA | 982 | Mod001L001mC*TeoGeoTeoAeo*G*A*A*A*G*G*C*A*T | OXOOOXXXXXXXXXX |
| 9868 | | | *G*mA*mA*mG*mC*mA | XXXXX |
| WV- | CTGTAGAAAGGCATGAAGCA | 983 | Mod001L001mC*STeoGeoTeoAeo*RG*SA*SA*SA*SG*RG* | OSOOORSSSSRSSR |
| 9869 | | | SC*SA*RT*SG*SmA*SmA*SmG*SmC*SmA | SSSSSS |
| WV- | CTGTAGAAAGGCATGAAGCA | 984 | Mod001L001mC*STeoGeoTeoAeo*RG*SA*SA*SA*SG*RG* | OSOOORSSSSRSSSSS |
| 9870 | | | SC*SA*ST*SG*SmA*SmA*SmG*SmC*SmA | SSSS |
| WV- | TGCCACUGUAGAAAGGCAUGATU | 985 | VPT*SfG*SmCfC*SmAfC*SmUfG*SmUmA*SmGmA*SmAfA* | SSOSOSOSOSOSO |
| 9883 | | | SmG*SmG*SmC*SmA*SmU*SmG*SmA*SAMC6T*SmU | SSSSSSSSS |
| WV- | TGCCACUGUAGAAAGGCAUGATU | 986 | VPT*SfG*SmCmC*SmAmC*SmUmG*SmUmA*SmGmA* | SSOSOSOSOSOSO |
| 9884 | | | SmAfA*SmG*SmG*SmC*SmA*SmU*SmG*SmA*SAMC6T* | SSSSSSSSS |
| | | | SmU | |
| WV- | CTGTAGAAAGGCATGAAGCA | 987 | m5Ceo*STeoGeoTeoAeo*RG*SA*SA*SA*SG*RG*SC*SA* | SOOORSSSSRSSRSR |
| 9889 | | | RT*SG*RAeoAeoGeom5Ceo*SAeo | OOOS |
| WV- | CTGTAGAAAGGCATGAAGCA | 988 | m5Ceo*STeoGeoTeoAeo*RG*SA*SA*SA*SG*RG*SC*SA* | SOOORSSSSRSSSSR |
| 9890 | | | ST*SG*RAeoAeoGeom5Ceo*SAeo | OOOS |
| WV- | CTGTAGAAAGGCATGAAGCA | 989 | mC*TeoGeoTeoAeo*G*A*A*A*G*G*C*A*T*G*mA* | XOOOXXXXXXXXXX |
| 9891 | | | mA*mG*mC*mA | XXXXX |
| WV- | CTGTAGAAAGGCATGAAGCA | 990 | mC*STeoGeoTeoAeo*RG*SA*SA*SA*SG*RG*SC*SA*RT* | SOOORSSSSRSSR |
| 9892 | | | SG*SmA*SmA*SmG*SmC*SmA | SSSSSS |
| WV- | CTGTAGAAAGGCATGAAGCA | 991 | mC*STeoGeoTeoAeo*RG*SA*SA*SA*SG*RG*SC*SA*ST* | SOOORSSSSRSSSSS |
| 9893 | | | SG*SmA*SmA*SmG*SmC*SmA | SSSS |
| WV- | CTGTAGAAAGGCATGAAGCA | 992 | mC*TeoGeoTeoAeo*G*A*A*A*G*G*C*A*T*G*Aeo* | XOOOXXXXXXXXXX |
| 9894 | | | mA*mG*mC*mA | XXXXX |
| WV- | CTGTAGAAAGGCATGAAGCA | 993 | mC*STeoGeoTeoAeo*RG*SA*SA*SA*SG*RG*SC*SA*RT* | SSSSRSSRSR |
| 9895 | | | SG*RAeo*SmA*SmG*SmC*SmA | SSSS |
| WV- | CTGTAGAAAGGCATGAAGCA | 994 | mC*STeoGeoTeoAeo*RG*SA*SA*SA*SG*RG*SC*SA*ST* | SOOORSSSSRSSSSR |
| 9896 | | | SG*RAeo*SmA*SmG*SmC*SmA | SSSS |
| WV- | CTGTAGAAAGGCATGAAGCA | 995 | L001m5Ceo*STeoGeoTeoAeo*RG*SA*SA*SA*SG*RG*SC* | OSOOORSSSSRSSRSR |
| 10247 | | | SA*RT*SG*RAeoAeoGeom5Ceo*SAeo | OOOS |
| WV- | CTGTAGAAAGGCATGAAGCA | 996 | L001m5Ceo*STeoGeoTeoAeo*RG*SA*SA*SA*SG*RG*SC* | OSOOORSSSSRSSSSR |
| 10248 | | | SA*ST*SG*RAeoAeoGeom5Ceo*SAeo | OOOS |
| WV- | CTGTAGAAAGGCATGAAGCA | 997 | L001mC*TeoGeoTeoAeo*G*A*A*A*G*G*C*A*T*G* | OXOOOXXXXXXXXXX |
| 10249 | | | mA*mA*mG*mC*mA | XXXXX |
| WV- | CTGTAGAAAGGCATGAAGCA | 998 | L001mC*STeoGeoTeoAeo*RG*SA*SA*SA*SG*RG*SC*SA* | OSOOORSSSSRSSR |
| 10250 | | | RT*SG*SmA*SmA*SmG*SmC*SmA | SSSSSS |
| WV- | CTGTAGAAAGGCATGAAGCA | 999 | L001mC*STeoGeoTeoAeo*RG*SA*SA*SA*SG*RG*SC*SA* | OSOOORSSSSRSSSSS |
| 10251 | | | ST*SG*SmA*SmA*SmG*SmC*SmA | SSSS |
| WV- | CTGTAGAAAGGCATGAAGCA | 1000 | L001mC*TeoGeoTeoAeo*G*A*A*A*G*G*C*A*T*G* | OXOOOXXXXXXXXXX |
| 10252 | | | Aeo*mA*mG*mC*mA | XXXXX |
| WV- | CTGTAGAAAGGCATGAAGCA | 1001 | L001mC*STeoGeoTeoAeo*RG*SA*SA*SA*SG*RG*SC*SA* | OSOOORSSSSRSSRSR |
| 10253 | | | RT*SG*RAeo*SmA*SmG*SmC*SmA | SSSS |
| WV- | CTGTAGAAAGGCATGAAGCA | 1002 | L001mC*STeoGeoTeoAeo*RG*SA*SA*SA*SG*RG*SC*SA* | OSOOORSSSSRSSSSR |
| 10254 | | | ST*SG*RAeo*SmA*SmG*SmC*SmA | SSSS |
| WV- | TCCUUCCCUGAAGGUUCCUCCTU | 1003 | VPT*fC*mCfU*mUfC*mCfC*mUfG*mAfA*mGfG*mU*fU* | XXOXOXOXOXOXO |
| 10320 | | | mC*fC*mU*fC*mC*TGaNC6T*mU | XXXXXXXXX |
| WV- | TCCUUCCCUGAAGGUUCCUCCTU | 1004 | VPT*fC*mCmU*mUmC*mCmC*mUmG*mAmA*mGfG*mU | XXOXOXOXOXOXO |
| 10321 | | | *mU*mC*mC*mU*mC*mC*TGaNC6T*mU | XXXXXXXXX |
| WV- | TCCUUCCCUGAAGGUUCCUCCTU | 1005 | PO5MRdT*fC*mCfU*mUfC*mCfC*mUfG*mAfA*mGfG*mU | XXOXOXOXOXOXO |
| 10322 | | | *fU*mC*fC*mU*fC*mC*TGaNC6T*mU | XXXXXXXXX |
| WV- | TCCUUCCCUGAAGGUUCCUCCTU | 1006 | PO5MRdT*fC*mCmU*mUmC*mCmC*mUmG*mAmA*mGfG | XXOXOXOXOXOXO |
| 10323 | | | *mU*mU*mC*mC*mU*mC*mC*TGaNC6T*mU | XXXXXXXXX |
| WV- | TCCUUCCCUGAAGGUUCCUCCTU | 1007 | VPT*SfC*SmCfU*SmUfC*SmCfC*SmUfG*SmAfA*SmGfG* | SSOSOSOSOSOSO |
| 10324 | | | SmU*SfU*SmC*SfC*SmU*SfC*SmC*STGaNC6T*SmU | SSSSSSSSS |
| WV- | TCCUUCCCUGAAGGUUCCUCCTU | 1008 | VPT*SfC*SmCmU*SmUmC*SmCmC*SmUmG*SmAmA* | SSOSOSOSOSOSO |
| 10325 | | | SmGfG*SmU*SmU*SmC*SmC*SmU*SmC*SmC*STGaNC6T | SSSSSSSSS |
| | | | *SmU | |
| WV- | TCCUUCCCUGAAGGUUCCUCCTU | 1009 | PO5MRdT*SfC*SmCfU*SmUfC*SmCfC*SmUfG*SmAfA* | SSOSOSOSOSOSO |
| 10326 | | | SmGfG*SmU*SfU*SmC*SfC*SmU*SfC*SmC*STGaNC6T* | SSSSSSSSS |
| | | | SmU | |
| WV- | TCCUUCCCUGAAGGUUCCUCCTU | 1010 | PO5MRdT*SfC*SmCmU*SmUmC*SmCmC*SmUmG*SmAmA* | SSOSOSOSOSOSO |
| 10327 | | | SmGfG*SmU*SmU*SmC*SmC*SmU*SmC*SmC*STGaNC6T | SSSSSSSSS |
| | | | *SmU | |
| WV- | TGCCACUGUAGAAAGGCAUGATU | 1011 | 5tzdT*SfG*SmCfC*SmAfC*SmUfG*SmUfA*SmGfA*SmAfA* | SSOSOSOSOSOSO |
| 10432 | | | SmG*SfG*SmC*SfA*SmU*SfG*SmA*STGaNC6T*SmU | SSSSSSSSS |
| WV- | TGCCACUGUAGAAAGGCAUGATU | 1012 | 5tzdT*SfG*SmCmC*SmAmC*SmUmG*SmUmA*SmGmA* | SSOSOSOSOSOSO |
| 10433 | | | SmAfA*SmG*SmG*SmC*SmA*SmU*SmG*SmA*STGaNC6T | SSSSSSSSS |
| | | | *SmU | |
| WV- | TGCCACUGUAGAAAGGCAUGATU | 1013 | 5tzdT*SfG*SmCfC*SmAfC*SmUfG*SmUfA*SmGfA*SmAfA* | SSOSOSOSOSOSO |
| 10434 | | | SmG*SfG*SmC*SfA*SmU*SfG*SmA*SAMC6T*SmU | SSSSSSSSS |
| WV- | TGCCACUGUAGAAAGGCAUGATU | 1014 | 5tzdT*SfG*SmCmC*SmAmC*SmUmG*SmUmA*SmGmA* | SSOSOSOSOSOSO |
| 10435 | | | SmAfA*SmG*SmG*SmC*SmA*SmU*SmG*SmA*SAMC6T* | SSSSSSSSS |
| | | | SmU | |
| WV- | CTGTAGAAAGGCATGAAGCA | 1015 | Mod001L001m5IC*STeoGeoTeoAeo*RG*SA*SA*SA*SG*RG | OSOOORSSSSRSSSSR |
| 11957 | | | *SC*SA*ST*SG*RAeoAeoGeom5Ceo*SIA | OOOS |
| WV- | CTGTAGAAAGGCATGAAGCA | 1016 | Mod001L001m5IC*STeoGeoTeoAeo*RG*SA*SA*SA*SG*RG | OSOOORSSSSRSSSSS |
| 11958 | | | *SC*SA*ST*SG*SmA*SmA*SmG*SmC*SIA | SSSS |
| WV- | CTGTAGAAAGGCATGAAGCA | 1017 | m5IC*STeoGeoTeoAeo*RG*SA*SA*SA*SG*RG*SC*SA*ST | SOOORSSSSRSSSSR |
| 11959 | | | *SG*RAeoAeoGeom5Ceo*SIA | OOOS |
| WV- | CTGTAGAAAGGCATGAAGCA | 1018 | m5IC*STeoGeoTeoAeo*RG*SA*SA*SA*SG*RG*SC*SA*ST | SOOORSSSSRSSSSS |
| 11960 | | | *SG*SmA*SmA*SmG*SmC*SIA | SSSS |
| WV- | CTGTAGAAAGGCATGAAGCA | 1019 | L001m5IC*STeoGeoTeoAeo*RG*SA*SA*SA*SG*RG*SC*SA | OSOOORSSSSRSSSSR |
| 11961 | | | *ST*SG*RAeoAeoGeom5Ceo*SIA | OOOS |
| WV- | CTGTAGAAAGGCATGAAGCA | 1020 | L001m5IC*STeoGeoTeoAeo*RG*SA*SA*SA*SG*RG*SC*SA | OSOOORSSSSRSSSSS |
| 11962 | | | *ST*SG*SmA*SmA*SmG*SmC*SIA | SSSS |
| WV- | TGCCACUGUAGAAAGGCAUGATU | 1021 | 5ptzdT*SfG*SmCfC*SmAfC*SmUfG*SmUfA*SmGfA*SmAfA* | SSOSOSOSOSOSO |
| 12070 | | | SmG*SfG*SmC*SfA*SmU*SfG*SmA*STGaNC6T*SmU | SSSSSSSSS |
| WV- | TGCCACUGUAGAAAGGCAUGATU | 1022 | 5tzpodT*SfG*SmCfC*SmAfC*SmUfG*SmUfA*SmGfA*SmAfA | SSOSOSOSOSOSO |
| 12071 | | | *SmG*SfG*SmC*SfA*SmU*SfG*SmA*STGaNC6T*SmU | SSSSSSSSS |
| WV- | TGCCACUGUAGAAAGGCAUGATU | 1023 | 5mvpdT*SfG*SmCfC*SmAfC*SmUfG*SmUfA*SmGfA*SmAfA | SSOSOSOSOSOSO |
| 12072 | | | *SmG*SfG*SmC*SfA*SmU*SfG*SmA*STGaNC6T*SmU | SSSSSSSSS |
| WV- | TGCCACUGUAGAAAGGCAUGATU | 1024 | 5pacetdT*SfG*SmCfC*SmAfC*SmUfG*SmUfA*SmGfA* | SSOSOSOSOSOSO |
| 12073 | | | SmAfA*SmG*SfG*SmC*SfA*SmU*SfG*SmA*STGaNC6T* | SSSSSSSSS |
| | | | SmU | |
| WV- | CACTGTAGAAAGGCATGAAGCAGG | 1025 | Mod001L001m5Ceo*SAeom5CeoTeoGeoTeoAeo*RG*SA*SA* | OSOOOOORSSSSR |
| 12098 | | | SA*SG*RG*SC*SA*ST*SG*RAeoAeoGeom5CeoAeoGeo* | SSSSROOOOOS |
| | | | SGeo | |
| WV- | CACTGTAGAAAGGCATGAAGCAGG | 1026 | Mod001L001mC*SAeom5CeoTeoGeoTeoAeo*RG*SA*SA*SA* | OSOOOOORSSSSR |
| 12099 | | | SG*RG*SC*SA*ST*SG*SmA*SmA*SmG*SmC*SmA*SmG | SSSSSSSSSSS |
| | | | *SmG | |
| WV- | CACTGTAGAAAGGCATGAAGCAGG | 1027 | m5Ceo*SAeom5CeoTeoGeoTeoAeo*RG*SA*SA*SA*SG*RG* | SOOOOORSSSSR |
| 12100 | | | SC*SA*ST*SG*RAeoAeoGeom5CeoAeoGeo*SGeo | SSSSROOOOOS |
| WV- | CACTGTAGAAAGGCATGAAGCAGG | 1028 | mC*SAeom5CeoTeoGeoTeoAeo*RG*SA*SA*SA*SG*RG*SC | SOOOOORSSSSR |
| 12101 | | | *SA*ST*SG*SmA*SmA*SmG*SmC*SmA*SmG*SmG | SSSSSSSSSSS |
| WV- | CACTGTAGAAAGGCATGAAGCAGG | 1029 | L001m5Ceo*SAeom5CeoTeoGeoTeoAeo*RG*SA*SA*SA*SG* | OSOOOOORSSSSR |
| 12102 | | | RG*SC*SA*ST*SG*RAeoAeoGeom5CeoAeoGeo*SGeo | SSSSROOOOOS |
| WV- | CACTGTAGAAAGGCATGAAGCAGG | 1030 | L001mC*SAeom5CeoTeoGeoTeoAeo*RG*SA*SA*SA*SG*RG | OSOOOOORSSSSR |
| 12103 | | | *SC*SA*ST*SG*SmA*SmA*SmG*SmC*SmA*SmG*SmG | SSSSSSSSSSS |
| WV- | CACTGTAGAAAGGCATGAAGCAGG | 1031 | Mod001L001m5Ceo*Aeom5CeoTeoGeoTeoAeo*G*A*A*A*G | OXOOOOOXXXXX |
| 12104 | | | *G*C*A*T*G*AeoAeoGeom5CeoAeoGeo*Geo | XXXXXXOOOOOX |
| WV- | CACTGTAGAAAGGCATGAAGCAGG | 1032 | Mod001L001mC*Aeom5CeoTeoGeoTeoAeo*G*A*A*A*G*G | OXOOOOOXXXXX |
| 12105 | | | *C*A*T*G*mA*mA*mG*mC*mA*mG*mG | XXXXXXXXXXXX |
| WV- | CACTGTAGAAAGGCATGAAGCAGG | 1033 | m5Ceo*Aeom5CeoTeoGeoTeoAeo*G*A*A*A*G*G*C*A* | XOOOOOXXXXX |
| 12106 | | | T*G*AeoAeoGeom5CeoAeoGeo*Geo | XXXXXXOOOOOX |
| WV- | CACTGTAGAAAGGCATGAAGCAGG | 1034 | mC*Aeom5CeoTeoGeoTeoAeo*G*A*A*A*G*G*C*A*T* | XOOOOOXXXXX |
| 12107 | | | G*mA*mA*mG*mC*mA*mG*mG | XXXXXXXXXXXX |
| WV- | CACTGTAGAAAGGCATGAAGCAGG | 1035 | L001m5Ceo*Aeom5CeoTeoGeoTeoAeo*G*A*A*A*G*G*C* | OXOOOOOXXXXX |
| 12108 | | | A*T*G*AeoAeoGeom5CeoAeoGeo*Geo | XXXXXXOOOOOX |
| WV- | CACTGTAGAAAGGCATGAAGCAGG | 1036 | L001mC*Aeom5CeoTeoGeoTeoAeo*G*A*A*A*G*G*C*A* | OXOOOOOXXXXX |
| 12109 | | | T*G*mA*mA*mG*mC*mA*mG*mG | XXXXXXXXXXXX |
| WV- | TGCCACUGUAGAAAGGCAUGAUU | 1037 | T*SfG*SmCfC*SmAfC*SmUfG*SmUfA*SmGfA*SmAfA*SmG | SSOSOSOSOSOSO |
| 12115 | | | *SfG*SmC*SfA*SmU*SfG*SmA*SmU*SmU | SSSSSSSSS |
| WV- | TGCCACUGUAGAAAGGCAUGAUU | 1038 | T*SfG*SmCn001fC*SmAfC*SmUfG*SmUfA*SmGfA*SmAfA* | SSnXSOSOSOSOSO |
| 12116 | | | SmG*SfG*SmC*SfA*SmU*SfG*SmA*SmU*SmU | SSSSSSSSS |
| WV- | TGCCACUGUAGAAAGGCAUGAUU | 1039 | T*SfG*SmCfC*SmAn001fC*SmUfG*SmUfA*SmGfA*SmAfA* | SSOSnXSOSOSOSO |
| 12117 | | | SmG*SfG*SmC*SfA*SmU*SfG*SmA*SmU*SmU | SSSSSSSSS |
| WV- | TGCCACUGUAGAAAGGCAUGAUU | 1040 | T*SfG*SmCfC*SmAfC*SmUn001fG*SmUfA*SmGfA*SmAfA* | SSOSOSnXSOSOSO |
| 12118 | | | SmG*SfG*SmC*SfA*SmU*SfG*SmA*SmU*SmU | SSSSSSSSS |
| WV- | TGCCACUGUAGAAAGGCAUGAUU | 1041 | T*SfG*SmCfC*SmAfC*SmUfG*SmUn001fA*SmGfA*SmAfA* | SSOSOSOSnXSOSO |
| 12119 | | | SmG*SfG*SmC*SfA*SmU*SfG*SmA*SmU*SmU | SSSSSSSSS |
| WV- | TGCCACUGUAGAAAGGCAUGAUU | 1042 | T*SfG*SmCfC*SmAfC*SmUfG*SmUfA*SmGn001fA*SmAfA* | SSOSOSOSOSnXSO |
| 12120 | | | SmG*SfG*SmC*SfA*SmU*SfG*SmA*SmU*SmU | SSSSSSSSS |
| WV- | TGCCACUGUAGAAAGGCAUGAUU | 1043 | T*SfG*SmCfC*SmAfC*SmUfG*SmUfA*SmGfA*SmAn001fA* | SSOSOSOSOSOSnX |
| 12121 | | | SmG*SfG*SmC*SfA*SmU*SfG*SmA*SmU*SmU | SSSSSSSSS |
| WV- | TGCCACUGUAGAAAGGCAUGAUU | 1044 | T*SfG*SmCn001fC*SmAn001fC*SmUn001fG*SmUn001fA* | SSnXSnXSnXSnXS |
| 12122 | | | SmGn001fA*SmAn001fA*SmG*SfG*SmC*SfA*SmU*SfG* | nXSnX |
| | | | SmA*SmU*SmU | SSSSSSSSS |
| WV- | TGCCACUGUAGAAAGGCAUGATU | 1045 | 5ptzdT*SfG*SmCfC*SmAfC*SmUfG*SmUfA*SmGfA*SmAfA* | SSOSOSOSOSOSO |
| 12254 | | | SmG*SfG*SmC*SfA*SmU*SfG*SmA*SAMC6T*SmU | SSSSSSSSS |
| WV- | TGCCACUGUAGAAAGGCAUGATU | 1046 | 5tzpodT*SfG*SmCfC*SmAfC*SmUfG*SmUfA*SmGfA*SmAfA | SSOSOSOSOSOSO |
| 12255 | | | *SmG*SfG*SmC*SfA*SmU*SfG*SmA*SAMC6T*SmU | SSSSSSSSS |
| WV- | TGCCACUGUAGAAAGGCAUGATU | 1047 | 5mvpdT*SfG*SmCfC*SmAfC*SmUfG*SmUfA*SmGfA*SmAfA | SSOSOSOSOSOSO |
| 12256 | | | *SmG*SfG*SmC*SfA*SmU*SfG*SmA*SAMC6T*SmU | SSSSSSSSS |
| WV- | TGCCACUGUAGAAAGGCAUGATU | 1048 | 5pacetdT*SfG*SmCfC*SmAfC*SmUfG*SmUfA*SmGfA* | SSOSOSOSOSOSO |
| 12257 | | | SmAfA*SmG*SfG*SmC*SfA*SmU*SfG*SmA*SAMC6T* | SSSSSSSSS |
| | | | SmU | |
| WV- | CCUGCUUCAUGCCUUUCUACAGUG | 1049 | rCrCrUrGrCrUrUrCrArUrGrCrCrUrUrUrCrUrArCrAr | 0OOOOOOOOO |
| 12420 | | | GrUrG | OOOOOOOOOOOOO |
| WV- | CCUGCUUCAUCCCCUUCUACAGUG | 1050 | rCrCrUrGrCrUrUrCrArUrCrCrCrCrUrUrCrUrArCrArG | OOOOOOOOOO |
| 12421 | | | rUrG | OOOOOOOOOOOOO |
| WV- | TGCCACUGUAGAAAGGCAUGATU | 1051 | VPT*SfG*SmCfC*SmAfC*SmUfG*SmUfA*SmGfA*SmAfA* | SSOSOSOSOSOSO |
| 12573 | | | SmG*SfG*SmC*SfA*SmU*SfG*SmA*Stbclc6T*SmU | SSSSSSSSS |
| WV- | TGCCACUGUAGAAAGGCAUGATU | 1052 | VPT*SfG*SmCfC*SmAfC*SmUfG*SmUfA*SmGfA*SmAfA* | SSOSOSOSOSOSO |
| 12574 | | | SmG*SfG*SmC*SfA*SmU*SfG*SmA*Sbbclc6T*SmU | SSSSSSSSS |
| WV- | CUUCAUGCCUUUCUACAGUGGCCU | 1053 | rCrUrUrCrArUrGrCrCrUrUrUrCrUrArCrArGrUrGrGrCrC | OOOOOOOOOO |
| 12874 | | | rU | OOOOOOOOOOOOO |
| WV- | CUUCAUCCCCUUCUACAGUGGCCU | 1054 | rCrUrUrCrArUrCrCrCrCrUrUrCrUrArCrArGrUrGrGr | OOOOOOOOOO |
| 12875 | | | CrCrU | OOOOOOOOOOOOO |
| WV- | GCCACUGUAGAAA | 1055 | L009*fG*mCfC*mAfC*mUfG*mUfA*mGfA*mAfA*mGfGmCf | XXOXOXOXOXOX |
| 9261 | GGCAUGATU | | AmUfGmA*T*mU | OXOOOOOOXX |
| WV- | TCCACUGUAGAAA | 1056 | T*L009*mCfC*mAfC*mUfG*mUfA*mGfA*mAfA*mGfGmCfAm | XXOXOXOXOXOX |
| 9262 | GGCAUGATU | | UfGmA*T*mU | OXOOOOOOXX |
| WV- | TGCACUGUAGAA | 1057 | T*fG*L009fC*mAfC*mUfG*mUfA*mGfA*mAfA*mGfGmCfAm | XXOXOXOXOXOX |
| 9263 | AGGCAUGATU | | UfGmA*T*mU | OXOOOOOOXX |
| WV- | TGCACUGUAGAA | 1058 | T*fG*mCL009*mAfC*mUfG*mUfA*mGfA*mAfA*mGfGmCfAm | XXOXOXOXOXOX |
| 9264 | AGGCAUGATU | | UfGmA*T*mU | OXOOOOOOXX |
| WV- | TGCCCUGUAGAA | 1059 | T*fG*mCfC*L009fC*mUfG*mUfA*mGfA*mAfA*mGfGmCfAmU | XXOXOXOXOXOX |
| 9265 | AGGCAUGATU | | fGmA*T*mU | OXOOOOOOXX |
| WV- | TGCCAUGUAGAA | 1060 | T*fG*mCfC*mAL009*mUfG*mUfA*mGfA*mAfA*mGfGmCfAm | XXOXOXOXOXOX |
| 9266 | AGGCAUGATU | | UfGmA*T*mU | OXOOOOOOXX |
| WV- | TGCCACGUAGAA | 1061 | T*fG*mCfC*mAfC*L009fG*mUfA*mGfA*mAfA*mGfGmCfAm | XXOXOXOXOXOX |
| 9267 | AGGCAUGATU | | UfGmA*T*mU | OXOOOOOOXX |
| WV- | TGCCACUUAGAA | 1062 | T*fG*mCfC*mAfC*mUL009*mUfA*mGfA*mAfA*mGfGmCfAm | XXOXOXOXOXOX |
| 9268 | AGGCAUGATU | | UfGmA*T*mU | OXOOOOOOXX |
| WV- | TGCCACUGAGAA | 1063 | T*fG*mCfC*mAfC*mUfG*L009fA*mGfA*mAfA*mGfGmCfAm | XXOXOXOXOXOX |
| 9269 | AGGCAUGATU | | UfGmA*T*mU | OXOOOOOOXX |
| WV- | TGCCACUGUGAA | 1064 | T*fG*mCfC*mAfC*mUfG*mUL009*mGfA*mAfA*mGfGmCfAm | XXOXOXOXOXOX |
| 9270 | AGGCAUGATU | | UfGmA*T*mU | OXOOOOOOXX |
| WV- | TGCCACUGUAAAA | 1065 | T*fG*mCfC*mAfC*mUfG*mUfA*L009fA*mAfA*mGfGmCfAm | XXOXOXOXOXOX |
| 9271 | GGCAUGATU | | UfGmA*T*mU | OXOOOOOOXX |
| WV- | TGCCACUGUAGAA | 1066 | T*fG*mCfC*mAfC*mUfG*mUfA*mGfA*mAL009*mGfGmCfAm | XXOXOXOXOXOX |
| 9272 | GGCAUGATU | | UfGmA*T*mU | OXOOOOOOXX |
| WV- | GCCACUGUAGAA | 1067 | L010*fG*mCfC*mAfC*mUfG*mUfA*mGfA*mAfA*mGfGmCfAm | XXOXOXOXOXOX |
| 9273 | AGGCAUGATU | | UfGmA*T*mU | OXOOOOOOXX |
| WV- | TCCACUGUAGAAA | 1068 | T*L010*mCfC*mAfC*mUfG*mUfA*mGfA*mAfA*mGfGmCfAm | XXOXOXOXOXOX |
| 9274 | GGCAUGATU | | UfGmA*T*mU | OXOOOOOOXX |
| WV- | TGCACUGUAGAA | 1069 | T*fG*L010fC*mAfC*mUfG*mUfA*mGfA*mAfA*mGfGmCfAm | XXOXOXOXOXOX |
| 9275 | AGGCAUGATU | | UfGmA*T*mU | OXOOO0OOXX |
| WV- | TGCACUGUAGAA | 1070 | T*fG*mCL010*mAfC*mUfG*mUfA*mGfA*mAfA*mGfGmCfAm | XXOXOXOXOXOX |
| 9276 | AGGCAUGATU | | UfGmA*T*mU | OXOOOOOOXX |
| WV- | TGCCCUGUAGAA | 1071 | T*fG*mCfC*L010fC*mUfG*mUfA*mGfA*mAfA*mGfGmCfAm | XXOXOXOXOXOX |
| 9277 | AGGCAUGATU | | UfGmA*T*mU | OXOOOOOOXX |
| WV- | TGCCAUGUAGAA | 1072 | T*fG*mCfC*mAL010*mUfG*mUfA*mGfA*mAfA*mGfGmCfAm | XXOXOXOXOXOX |
| 9278 | AGGCAUGATU | | UfGmA*T*mU | OXOOOOOOXX |
| WV- | TGCCACGUAGAA | 1073 | T*fG*mCfC*mAfC*L010fG*mUfA*mGfA*mAfA*mGfGmCfAm | XXOXOXOXOXOX |
| 9279 | AGGCAUGATU | | UfGmA*T*mU | OXOOOOOOXX |
| WV- | TGCCACUUAGAA | 1074 | T*fG*mCfC*mAfC*mUL010*mUfA*mGfA*mAfA*mGfGmCfAm | XXOXOXOXOXOX |
| 9280 | AGGCAUGATU | | UfGmA*T*mU | OXOOOOOOXX |
| WV- | TGCCACUGAGAA | 1075 | T*fG*mCfC*mAfC*mUfG*L010fA*mGfA*mAfA*mGfGmCfAm | XXOXOXOXOXOX |
| 9281 | AGGCAUGATU | | UfGmA*T*mU | OXOOOOOOXX |
| WV- | TGCCACUGUGAA | 1076 | T*fG*mCfC*mAfC*mUfG*mUL010*mGfA*mAfA*mGfGmCfAm | XXOXOXOXOXOX |
| 9282 | AGGCAUGATU | | UfGmA*T*mU | OXOOOOOOXX |
| WV- | TGCCACUGUAAAA | 1077 | T*fG*mCfC*mAfC*mUfG*mUfA*L010fA*mAfA*mGfGmCfAm | XXOXOXOXOXOX |
| 9283 | GGCAUGATU | | UfGmA*T*mU | OXOOOOOOXX |
| WV- | TGCCACUGUAGAA | 1078 | T*fG*mCfC*mAfC*mUfG*mUfA*mGfA*mAL010*mGfGmCfAm | XXOXOXOXOXOX |
| 9284 | GGCAUGATU | | UfGmA*T*mU | OXOOOOOOXX |
| WV- | TGCCACUGUAGAA | 1079 | VPT*SfG*SmCmC*SmAmC*SmUmG*SmUmA*SmGmA*SmAfA* | SSOSOSOSOSO |
| 13443 | AGGCAUGATU | | SmG*SmG*SmC*SmA*SmU*SmG*SmA*Stbc1c6T*SmU | SOSSSSSSSSS |
| WV- | CACTGTAGAAAGG | 1080 | Mod001L001mC*SAeom5CeoTeoGeoTeoAeo*RG*SA*SA*SA* | OSOOOOORSSS |
| 13555 | CATGAAGCAGG | | SG*RG*SC*SA*ST*SG*RAeo*SmA*SmG*SmC*SmA*SmG*SmG | SRSSSSRSSSSSS |
| WV- | CACTGTAGAAAGG | 1081 | Mod001L001m5Ceo*SAeom5CeoTeoGeoTeoAeo*RG*SA*SA* | OSOOOOORSSS |
| 13556 | CATGAAGCAGG | | SA*SG*RG*SC*SA*ST*SG*RAeo*SmA*SmG*SmC*SmA*SmG*SmG | SRSSSSRSSSSSS |
| WV- | CACTGTAGAAAGG | 1082 | Mod001L001m5Ceo*RAeom5CeoTeoGeoTeoAeo*RG*SA*SA* | OROOOOORSSS |
| 13557 | CATGAAGCAGG | | SA*SG*RG*SC*SA*ST*SG*RAeo*SmA*SmG*SmC*SmA*SmG*SmG | SRSSSSRSSSSSS |
| WV- | CACTGTAGAAAGG | 1083 | Mod001L001m5Ceo*RAeom5CeoTeoGeoTeoAeo*RG*SA*SA* | OROOOOORSSS |
| 13558 | CATGAAGCAGG | | SA*SG*RG*SC*SA*ST*SG*SAeo*SmA*SmG*SmC*SmA*SmG*SmG | SRSSSSSSSSSSS |
| WV- | CACTGTAGAAAGG | 1084 | Mod001L001m5Ceo*SAeom5CeoTeoGeoTeoAeo*RG*SA*SA* | OSOOOOORSSS |
| 13559 | CATGAAGCAGG | | SA*SG*RG*SC*SA*ST*SG*SAeo*SmA*SmG*SmC*SmA*SmG*SmG | SRSSSSSSSSSSS |
| WV- | CACTGTAGAAAGG | 1085 | L001mC*SAeom5CeoTeoGeoTeoAeo*RG*SA*SA*SA*SG*RG* | OSOOOOORSSSS |
| 13560 | CATGAAGCAGG | | SC*SA*ST*SG*RAeo*SmA*SmG*SmC*SmA*SmG*SmG | RSSSSRSSSSSS |
| WV- | CACTGTAGAAAGG | 1086 | L001m5Ceo*SAeom5CeoTeoGeoTeoAeo*RG*SA*SA*SA*SG* | OSOOOOORSSS |
| 13561 | CATGAAGCAGG | | RG*SC*SA*ST*SG*RAeo*SmA*SmG*SmC*SmA*SmG*SmG | SRSSSSRSSSSSS |
| WV- | CACTGTAGAAAGG | 1087 | L001m5Ceo*RAeom5CeoTeoGeoTeoAeo*RG*SA*SA*SA*SG* | OROOOOORSSSSR |
| 13562 | CATGAAGCAGG | | RG*SC*SA*ST*SG*RAeo*SmA*SmG*SmC*SmA*SmG*SmG | SSSSRSSSSSS |
| WV- | CACTGTAGAAAGG | 1088 | L001m5Ceo*RAeom5CeoTeoGeoTeoAeo*RG*SA*SA*SA*SG* | OROOOOORSSSS |
| 13563 | CATGAAGCAGG | | RG*SC*SA*ST*SG*SAeo*SmA*SmG*SmC*SmA*SmG*SmG | RSSSSSSSSSSS |
| WV- | CACTGTAGAAAGG | 1089 | L001m5Ceo*SAeom5CeoTeoGeoTeoAeo*RG*SA*SA*SA*SG* | OSOOOOORSSS |
| 13564 | CATGAAGCAGG | | RG*SC*SA*ST*SG*SAeo*SmA*SmG*SmC*SmA*SmG*SmG | SRSSSSSSSSSSS |
| WV- | CACTGTAGAAAGG | 1090 | mC*SAeom5CeoTeoGeoTeoAeo*RG*SA*SA*SA*SG*RG*SC* | SOOOOORSSSS |
| 13565 | CATGAAGCAGG | | SA*ST*SG*RAeo*SmA*SmG*SmC*SmA*SmG*SmG | RSSSSRSSSSSS |
| WV- | CACTGTAGAAAGG | 1091 | m5Ceo*SAeom5CeoTeoGeoTeoAeo*RG*SA*SA*SA*SG*RG* | SOOOOORSSSS |
| 13566 | CATGAAGCAGG | | SC*SA*ST*SG*RAeo*SmA*SmG*SmC*SmA*SmG*SmG | RSSSSRSSSSSS |
| WV- | CACTGTAGAAAGG | 1092 | m5Ceo*RAeom5CeoTeoGeoTeoAeo*RG*SA*SA*SA*SG*RG* | ROOOOORSSSSR |
| 13567 | CATGAAGCAGG | | SC*SA*ST*SG*RAeo*SmA*SmG*SmC*SmA*SmG*SmG | SSSSRSSSSSS |
| WV- | CACTGTAGAAAGG | 1093 | m5Ceo*RAeom5CeoTeoGeoTeoAeo*RG*SA*SA*SA*SG*RG* | ROOOOORSSS |
| 13568 | CATGAAGCAGG | | SC*SA*ST*SG*SAeo*SmA*SmG*SmC*SmA*SmG*SmG | SRSSSSSSSSSSS |
| WV- | CACTGTAGAAAGG | 1094 | m5Ceo*SAeom5CeoTeoGeoTeoAeo*RG*SA*SA*SA*SG*RG* | SOOOOORSSSSR |
| 13569 | CATGAAGCAGG | | SC*SA*ST*SG*SAeo*SmA*SmG*SmC*SmA*SmG*SmG | SSSSSSSSSSS |
| WV- | TGCCACUGUAGAAA | 1095 | 5mpdT*SfG*SmCfC*SmAfC*SmUfG*SmUfA*SmGfA*SmAfA* | SSOSOSOSOSO |
| 13588 | GGCAUGATU | | SmG*SfG*SmC*SfA*SmU*SfG*SmA*STGaNC6T*SmU | SOSSSSSSSSS |
| WV- | TGCCACUGUAGAAA | 1096 | 5mrpdT*SfG*SmCfC*SmAfC*SmUfG*SmUfA*SmGfA*SmAfA* | SSOSOSOSOSO |
| 13589 | GGCAUGATU | | SmG*SfG*SmC*SfA*SmU*SfG*SmA*STGaNC6T*SmU | SOSSSSSSSSS |
| WV- | TGCCACUGUAGAAA | 1097 | 5mspdT*SfG*SmCfC*SmAfC*SmUfG*SmUfA*SmGfA*SmAfA* | SSOSOSOSOSO |
| 13590 | GGCAUGATU | | SmG*SfG*SmC*SfA*SmU*SfG*SmA*STGaNC6T*SmU | SOSSSSSSSSS |
| WV- | TGCCACUGUAGAAA | 1098 | 5mpdT*SfG*SmCfC*SmAfC*SmUfG*SmUfA*SmGfA*SmAfA* | SSOSOSOSOSO |
| 13591 | GGCAUGATU | | SmG*SfG*SmC*SfA*SmU*SfG*SmA*SAMC6T*SmU | SOSSSSSSSSS |
| WV- | TGCCACUGUAGAAA | 1099 | 5mrpdT*SfG*SmCfC*SmAfC*SmUfG*SmUfA*SmGfA*SmAfA* | SSOSOSOSOS |
| 13592 | GGCAUGATU | | SmG*SfG*SmC*SfA*SmU*SfG*SmA*SAMC6T*SmU | OSOSSSSSSSSS |
| WV- | TGCCACUGUAGAAA | 1100 | 5mspdT*SfG*SmCfC*SmAfC*SmUfG*SmUfA*SmGfA*SmAfA* | SSOSOSOSOSO |
| 13593 | GGCAUGATU | | SmG*SfG*SmC*SfA*SmU*SfG*SmA*SAMC6T*SmU | SOSSSSSSSSS |
| WV- | ACTGTAGAAAGG | 1101 | Mod001L001mA*Sm5CeoTeoGeoTeoAeo*RG*SA*SA*SA*SG* | OSOOOORSSSS |
| 13668 | CATGAAGCAG | | RG*SC*SA*ST*SG*RAeo*SmA*SmG*SmC*SmA*SmG | RSSSSRSSSSS |
| WV- | ACTGTAGAAAGG | 1102 | Mod001L001Aeo*Sm5CeoTeoGeoTeoAeo*RG*SA*SA*SA*T | OSOOOORSSSS |
| 13669 | CATGAAGCAG | | SG*RG*SC*SA*S*SG*RAeo*SmA*SmG*SmC*SmA*SmG | RSSSSRSSSSS |
| WV- | ACTGTAGAAAGG | 1103 | Mod001L001Aeo*Rm5CeoTeoGeoTeoAeo*RG*SA*SA*SA* | OROOOORSSSS |
| 13670 | CATGAAGCAG | | SG*RG*SC*SA*ST*SG*RAeo*SmA*SmG*SmC*SmA*SmG | RSSSSRSSSSS |
| WV- | ACTGTAGAAAGG | 1104 | Mod001L001Aeo*Rm5CeoTeoGeoTeoAeo*RG*SA*SA*SA* | OROOOORSSSS |
| 13671 | CATGAAGCAG | | SG*RG*SC*SA*ST*SG*SAeo*SmA*SmG*SmC*SmA*SmG | RSSSSSSSSSS |
| WV- | ACTGTAGAAAGG | 1105 | Mod001L001Aeo*Sm5CeoTeoGeoTeoAeo*RG*SA*SA*SA* | OSOOOORSSSS |
| 13672 | CATGAAGCAG | | SG*RG*SC*SA*ST*SG*SAeo*SmA*SmG*SmC*SmA*SmG | RSSSSSSSSSS |
| WV- | ACTGTAGAAAGG | 1106 | L001mA*Sm5CeoTeoGeoTeoAeo*RG*SA*SA*SA*SG*RG* | OSOOOORSSSS |
| 13673 | CATGAAGCAG | | SC*SA*ST*SG*RAeo*SmA*SmG*SmC*SmA*SmG | RSSSSRSSSSS |
| WV- | ACTGTAGAAAGG | 1107 | L001Aeo*Sm5CeoTeoGeoTeoAeo*RG*SA*SA*SA*SG*RG* | OSOOOORSSSS |
| 13674 | CATGAAGCAG | | SC*SA*ST*SG*RAeo*SmA*SmG*SmC*SmA*SmG | RSSSSRSSSSS |
| WV- | ACTGTAGAAAGG | 1108 | L001Aeo*Rm5CeoTeoGeoTeoAeo*RG*SA*SA*SA*SG*RG* | OROOOORSSSS |
| 13675 | CATGAAGCAG | | SC*SA*ST*SG*RAeo*SmA*SmG*SmC*SmA*SmG | RSSSSRSSSSS |
| WV- | ACTGTAGAAAGG | 1109 | L001Aeo*Rm5CeoTeoGeoTeoAeo*RG*SA*SA*SA*SG*RG* | OROOOORSSSS |
| 13676 | CATGAAGCAG | | SC*SA*ST*SG*SAeo*SmA*SmG*SmC*SmA*SmG | RSSSSSSSSSS |
| WV- | ACTGTAGAAAGG | 1110 | L001Aeo*Sm5CeoTeoGeoTeoAeo*RG*SA*SA*SA*SG*RG* | OSOOOORSSSS |
| 13677 | CATGAAGCAG | | SC*SA*ST*SG*SAeo*SmA*SmG*SmC*SmA*SmG | RSSSSSSSSSS |
| WV- | ACTGTAGAAAGG | 1111 | mA*Sm5CeoTeoGeoTeoAeo*RG*SA*SA*SA*SG*RG*SC*SA* | SOOOORSSSS |
| 13678 | CATGAAGCAG | | ST*SG*RAeo*SmA*SmG*SmC*SmA*SmG | RSSSSRSSSSS |
| WV- | ACTGTAGAAAGG | 1112 | Aeo*Sm5CeoTeoGeoTeoAeo*RG*SA*SA*SA*SG*RG*SC*SA* | SOOOORSSSS |
| 13679 | CATGAAGCAG | | ST*SG*RAeo*SmA*SmG*SmC*SmA*SmG | RSSSSRSSSSS |
| WV- | ACTGTAGAAAGG | 1113 | Aeo*Rm5CeoTeoGeoTeoAeo*RG*SA*SA*SA*SG*RG*SC*SA* | ROOOORSSSS |
| 13680 | CATGAAGCAG | | ST*SG*RAeo*SmA*SmG*SmC*SmA*SmG | RSSSSRSSSSS |
| WV- | ACTGTAGAAAGG | 1114 | Aeo*Rm5CeoTeoGeoTeoAeo*RG*SA*SA*SA*SG*RG*SC*SA* | ROOOORSSSS |
| 13681 | CATGAAGCAG | | ST*SG*SAeo*SmA*SmG*SmC*SmA*SmG | RSSSSSSSSSS |
| WV- | ACTGTAGAAAGG | 1115 | Aeo*Sm5CeoTeoGeoTeoAeo*RG*SA*SA*SA*SG*RG*SC*SA* | SOOOORSSSS |
| 13682 | CATGAAGCAG | | ST*SG*SAeo*SmA*SmG*SmC*SmA*SmG | RSSSSSSSSSS |
| WV- | CTGTAGAAAGGC | 1116 | Mod001L001m5Ceo*RTeoGeoTeoAeo*RG*SA*SA*SA*SG*RG* | OROOORSSSSR |
| 13800 | ATGAAGCA | | SC*SA*ST*SG*RAeo*SmA*SmG*SmC*SmA | SSSSRSSSS |
| WV- | CTGTAGAAAGGC | 1117 | L001m5Ceo*RTeoGeoTeoAeo*RG*SA*SA*SA*SG*RG*SC*SA* | OROOORSSSS |
| 13801 | ATGAAGCA | | ST*SG*RAeo*SmA*SmG*SmC*SmA | RSSSSRSSSS |
| WV- | CTGTAGAAAGGC | 1118 | m5Ceo*RTeoGeoTeoAeo*RG*SA*SA*SA*SG*RG*SC*SA*ST* | ROOORSSSS |
| 13802 | ATGAAGCA | | SG*RAeo*SmA*SmG*SmC*SmA | RSSSSRSSSS |
| WV- | GCUUCAUGCCUU | 1119 | rGrCrUrUrCrArUrGrCrCrUrUrUrCrUrArCrArGrUrGrGrCr | OOOOOOOOOO |
| 14090 | UCUACAGUGGCCU | | CrU | OOOOOOOOOO |
| | | | | OOOO |
| WV- | GCUUCAUCCCCUUC | 1120 | rGrCrUrUrCrArUrCrCrCrCrUrUrCrUrArCrArGrUrGrGrCr | OOOOOOOOOO |
| 14091 | UACAGUGGCCU | | CrU | OOOOOOOOOO |
| | | | | OOOO |
| WV- | TGCCACUGUAGAAA | 1121 | VPT*SfG*SmCfC*SmAfC*SmUfG*SmUfA*SmGfA*SmAfA*SmG* | SSOSOSOSOSO |
| 14102 | GGCAUGATU | | SfG*SmC*SfA*SmU*SfG*SmA*SaamC6T*SmU | SOSSSSSSSSS |
| WV- | TGCCACUGUAGAAA | 1122 | VPT*SfG*SmCfC*SmAfC*SmUfG*SmUfA*SmGfA*SmAfA*SmG* | SSOSOSOSOSO |
| 14103 | GGCAUGATU | | SfG*SmC*SfA*SmU*SfG*SmA*Spac6dT*SmU | SOSSSSSSSSS |
| WV- | TGCCACUGUAGAAA | 1123 | VPT*SfG*SmCfC*SmAfC*SmUfG*SmUfA*SmGfA*SmAfA*SmG* | SSOSOSOSOSO |
| 14336 | GGCAUTU | | SfG*SmC*SfA*SmU*STGaNC6T*SmU | SOSSSSSSS |
| WV- | TGCCACUGUAGAAA | 1124 | 5mrpdT*SfG*SmCfC*SmAfC*SmUfG*SmUfA*SmGfA*SmAfA* | SSOSOSOSOSO |
| 14337 | GGCAUTU | | SmG*SfG*SmC*SfA*SmU*STGaNC6T*SmU | SOSSSSSSS |
| WV- | TGCCACUGUAGAAA | 1125 | 5mspdT*SfG*SmCfC*SmAfC*SmUfG*SmUfA*SmGfA*SmAfA* | SSOSOSOSOSO |
| 14338 | GGCAUTU | | SmG*SfG*SmC*SfA*SmU*STGaNC6T*SmU | SOSSSSSSS |
| WV- | TGCCACUGUAGAAA | 1126 | VPT*SfG*SmCfC*SmAfC*SmUfG*SmUfA*SmGfA*SmAfA* | SSOSOSOSOSO |
| 14339 | GGCAUTU | | SmG*SfG*SmC*SfA*SmU*SAMC6T*SmU | SOSSSSSSS |
| WV- | TGCCACUGUAGAAA | 1127 | 5mrpdT*SfG*SmCfC*SmAfC*SmUfG*SmUfA*SmGfA* | SSOSOSOSOSO |
| 14340 | GGCAUTU | | SmAfA*SmG*SfG*SmC*SfA*SmU*SAMC6T*SmU | SOSSSSSSS |
| WV- | TGCCACUGUAGAAA | 1128 | 5mspdT*SfG*SmCfC*SmAfC*SmUfG*SmUfA*SmGfA* | SSOSOSOSOSO |
| 14341 | GGCAUTU | | SmAfA*SmG*SfG*SmC*SfA*SmU*SAMC6T*SmU | SOSSSSSSS |

The disclosure notes that some sequences, due to their length, are divided into multiple lines; however, these sequences, as are all oligonucleotides in Table 1A, are single-stranded (unless otherwise noted).

Moieties and modifications listed in the Tables (or compounds used to construct oligonucleotides comprising these moieties or modifications:

| | |
|---|---|
| IT | [chemical structure] if between 5′-end groups and/or intemucleotidic linkages (e.g., in WV-3819); |
| | [chemical structure] if at 5′-end and without 5′-end groups (e.g., in WV-3818); |
| | [chemical structure] if at 3′-end (e.g., in WV-7821). |
| IG | [chemical structure] if between 5′-end groups and/or intemucleotidic linkages (e.g., in WV-6689); |
| | [chemical structure] if at 5′-end and without 5′-end groups (e.g., in WV-6711); |
| | [chemical structure] if at 3′-end (e.g., in WV-7827). |
| IA | [chemical structure] if between 5′-end groups and/or intemucleotidic linkages (e.g., in WV-6692); |
| | [chemical structure] if at 5′-end and without 5′-end groups (e.g., in WV-6710); |
| | [chemical structure] if at 3′-end (e.g., in WV-7817). |
| Im5C | [chemical structure] if between 5′-end groups and/or intemucleotidic linkages (e.g., in WV-6690); |
| | [chemical structure] if at 5′-end and without 5′-end groups (e.g., in WV-7817); |
| | [chemical structure] if at 3′-end (e.g., in WV-7818). |
| MeOT | [chemical structure] |
| Mod001 | [chemical structure] |
| Mod022 | CH₃CH₂CH₂—; connected to 5′-end of oligonucleotide chain through either a phosphate |
| | linkage (O or PO) or phosphorothioate linkage (* if the phosphorothioate not chirally |
| | controlled; can also be Sp if chirally controlled and has an Sp configuration, and Rp if |
| | chirally controlled and has an Rp configuration) as illustrated. |
| PH | [chemical structure] |
| Mod023 | [chemical structure] connected to 5′-end of oligonucleotide chain through either a phosphate linkage (O or PO) or phosphorothioate linkage (* if the phosphorothioate not chirally controlled; can also be Sp if chirally controlled and has an Sp configuration, and Rp if chirally controlled and has an Rp configuration) as illustrated. |
| VPT | [chemical structure] |
| Mod034 | [chemical structure] |
| Mod035 | [chemical structure] |
| Mod036 | [chemical structure] |
| Mod038 | [chemical structure] |
| Mod039 | [chemical structure] |
| Mod040 | [chemical structure] |
| Mod041 | [chemical structure] |
| Mod079 | [chemical structure] |
| Mod080 | [chemical structure] |
| Mod081 | [chemical structure] |
| Mod082 | [chemical structure] |
| Mod083 | [chemical structure] |
| 5mp | [chemical structure] |
| 5MR | [chemical structure] |
| 5mrp | [chemical structure] |
| 5MS | [chemical structure] |
| 5msp | [chemical structure] |
| 5mvp | [chemical structure] |
| 5pacet | [chemical structure] |
| 5ptz | [chemical structure] |
| 5tz | [chemical structure] |
| 5tzpo | [chemical structure] |
| 5mpdT | [chemical structure] |
| 5MRdT | [chemical structure] |
| 5mrpdT | [chemical structure] |
| 5MSdT | [chemical structure] |
| 5mspdT | [chemical structure] |
| 5mvpdT | [chemical structure] |
| 5pacetdT | [chemical structure] |
| 5ptzdT | [chemical structure] |
| 5tzdT | [chemical structure] |
| 5tzpodT | [chemical structure] |
| tbclc6T | [chemical structure] |
| bbclc6T | [chemical structure] |
| L009 | —CH₂CH₂CH₂—. When L009 is present at the 5′-end of an oligonucleotide without a Mod, one end of L009 is connected to |
| | —OH and the other end connected to a 5′-carbon of the oligonucleotide chain via a linkage indicated (e.g., in WV-9261, via a |
| | stereorandom phosphorothioate linkage (“*”)). |

In some embodiments, a linker, e.g., L009, L010, etc., can replace a sugar, and is bonded on either end to an internucleotidic linkage. For example:
WV-9266 comprises . . . * mAL009 * mUfG*, . . . , which represents, from 5′ to 3′, a phosphorothioate (*), a sugar which is 2′-OMe (m) attached to a base (A), a phosphodiester linkage (not indicated), a L009 linker (L009), a phosphorothioate (*), a sugar which is 2′-OMe attached to a base which is U (mU), a phosphodiester linkage (not indicated), a sugar which is 2′-F (f) attached to a base (G) and a phosphorothioate. WV-9267 comprises . . . * mAfC * L009fG . . . , which represents, from 5′ to 3′, a phosphorothioate (*), a sugar which is 2′-OMe (m) attached to a base (A), a phosphodiester (not indicated), a sugar which is 2′-F (f) attached to a base (C), a phosphorothioate, a L009 linker (L009), a phosphodiester linkage (not indicated), a sugar which is 2′4′ (f) attached to a base (G), and a phosphorothioate.

| | |
|---|---|
| L010 | [chemical structure] |
| | L010 is connected in the same fashion as typically in DNA (the 5′- |
| | carbon of a first sugar is connected to a 3′-carbon of a second sugar via an |
| | internucleotidic linkage, and the 3′-carbon of the first sugar is connected to the |
| | 5′-carbon of a third sugar via an internucleotidic linkage). When L010 is present |
| | at the 5′-end of an oligonucleotide without a Mod, the 5′-carbon of L010 is |
| | connected to —OH and the 3′-carbon connected to a 5′-carbon of the |
| | oligonucleotide chain via a linkage as indicated (e.g., in WV-9250, via a |
| | stereorandom phosphorothioate linkage (“*”)). |

In some embodiments, L010 can replace a sugar, and L010 is bonded on either end to an internucleotidic linkage.

[chemical structure]

[chemical structure]

### Additional Abbreviations:

### AMC6T:

[chemical structure]

### eo: 2′-MOE

### F, f: 2′-F

### GaNC6T:

[chemical structure]

### 1: 2′-O—CH₂₋₄″

[chemical structure]

### IMU:

[chemical structure]

L001: —NH—(CH₂)₆— linker (C6 linker. C6 amine linker or C6 amino linker), connected to Mod, if any (if no Mod, e.g., in WV-8240), through —NH—, and the 5′-end (e.g., in WV-2406) or 3′-end of oligonucleotide chain through either a phosphate linkage (O or PO) or phosphorothioate linkage (* if the phosphorothioate not chirally controlled; can also be Sp if chi rally controlled and has an Sp configuration, and Rp if chirally controlled and has an Rp configuration) as illustrated. For example, in WV-2406, L001 is connected to Mod001 through —NH— (forming an amide group —C(O)—NH—), and is connected to the oligonucleotide chain through a phosphate linkage (OXXXXXXXXXXXXXXXXXX); in WV-2422, L001 is not connected to any Mod, but —H, through —NH—, and is connected to the oligonucleotide chain through a phosphate linkage (OXXXXXXXXXXXXXXXXXX)

### L003:

[chemical structure]

linker, connected to Mod, if any (if no Mod, —H, e.g., in WV-2426), through its amino group, and the 5′-end (e.g., in WV-2407) or 3′-end (e.g., in WV-8070) of oligonucleotide chain through either a phosphate linkage (O or PO) or phosphorothioate linkage (* if the phosphorothioate not chirally controlled; can also be Sp if chirally controlled and has an Sp configuration, and Rp if chirally controlled and has an Rp configuration) as illustrated. For example, in WV-2407. L003 is connected to Mod001 through its amino group (forming, an amide group

[chemical structure]

and is connected to the 5′-end of oligonucleotide chain through a phosphate linkage (OXXXXXXXXXXXXKXXXXX); in WV-2426, L001 is not connected to any Mod, but —H, through —NH—, and is connected to the oligonucleotide chain through a phosphate linkage (OXXXXXXXXXXXXXXXXXXX); in WV-8070, L003 is connected to Mod001 through its amino group (forming an amide group

[chemical structure]

and is connected to the 3′-end of oligonucleotide chain through a phosphate linkage ( . . . XXXXXXXXXXXXXXXXXXXO)

### m: T-OMe

[0440] m5: methyl at 5-position of C (nucleobase is 5-methylcytosine)
m5Ceo: 5-methyl 2′-methoxyethyl C

### OMe: 2′-OMe

[0441] O, PO: phosphodiester (phosphate); can be an end group (typically “PO”; for example in WV-4260: POT*fC* . . . ), or a linkage, e.g., a linkage between linker and oligonucleotide chain, an internucleotidic linkage, etc.
*, PS: Phosphorothioate; can be an end group (typically “PS”, for example, in WV-2653: PST*fA* . . . ), or a linkage, e.g., a linkage between linker and oligonucleotide chain, an internucleotidic linkage, etc.
R, Rp: Phosphorothioate in Rp conformation
S, Sp: Phosphorothioate in Sp conformation
X: Stereorandom phosphorothioate

[0442] In some embodiments, a provided oligonucleotide composition is a single-stranded RNAi agent listed in Table 1A or otherwise described herein. In some embodiments, example properties of provided oligonucleotides were demonstrated.

[0443] In some embodiments, a provided oligonucleotide has a structure of any of formats illustrated in FIG. 1.

[0444] The present disclosure presents many non-limiting examples of oligonucleotides capable of mediating single-stranded RNA interference (e.g., single-stranded RNAi agents). Experimental data (not shown) demonstrated that various putative single-stranded RNAi agents were, in fact, capable of mediating RNA interference. In some experiments, an in vitro Ago-2 assay was used, including the use of a RNA test substrate WV-2372 (which targets a different gene, APOC3). The band representing the RNA test substrate is absent in the presence of oligonucleotides WV-1308 and WV-2420, indicating that these oligonucleotides are single-stranded RNAi agents capable of mediating RNA interference. The remaining lanes are controls: Substrate in the absence of negative control ASO WV-2134; substrate in the presence of negative control ASO WV-2134, which does not mediate RNA interference; substrate in the absence of test oligonucleotide WV-1308; substrate in the absence of test oligonucleotide WV-2420; substrate alone; no substrate, with added WV-2134; and no substrate, with added WV-1308. Also performed (data not shown) was an in vitro Ago-2 assay, using a APOC3 mRNA as a test substrate in a 3′ RACE assay in Hep3B cells. A cleavage product of the APOC3 mRNA in the presence of test oligonucleotide WV-3021 was detected, the product corresponding to cleavage of the mRNA at a site corresponding to a cut between positions 10 and 11 of WV-3021. An artifactual cleavage product was also detected. Experimental data (not shown) demonstrated that dual mechanism oligonucleotide WV-2111 is capable of mediating knockdown by both RNase H and RNA interference. In an experiment, several oligonucleotides were capable of mediating RNA interference. The RNA test substrate was WV-2372. The experiment showed disappearance of the RNA test substrate in the presence of test oligonucleotides WV-1308; WV-2114; WV-2386; and WV-2387, indicating that all these oligonucleotides are capable of acting as single-stranded RNAi agents mediating RNA interference. The remaining lanes are controls. Thus, the experiment showed that oligonucleotides WV-1308, WV-2114, WV-2386, and WV-2387 were all able to mediate RNA interference. Thus, the experiments showed, that several single-stranded RNAi agents (e.g., WV-1308_ WV-2420, WV-3021, WV-2111, WV-2114, WV-2386, and WV-2387) are capable of mediating RNA interference. The present disclosure presents many non-limiting examples of oligonucleotides, having any of various sequences, formats, modifications, 5 end regions, seed regions, post-seed regions, and 3′-end regions, and which are capable of mediating single-stranded RNA interference (e.g., single-stranded RNAi agents).

[0445] Formats of Oligonucleotides

[0446] In some embodiments, provided oligonucleotides are capable of directing a decrease in the expression and/or level of a target gene or its gene product. In some embodiments, provided oligonucleotides are capable of directing a decrease in the expression and/or level of a target gene or its gene product via RNA interference. In some embodiments, provided oligonucleotides are capable of directing a decrease in the expression and/or level of a target gene or its gene product via a biochemical mechanism which does not involve RNA interference or RISC (including, hut not limited to, RNaseH-mediated knockdown or steric hindrance of gene expression). In some embodiments, provided oligonucleotides are capable of directing a decrease in the expression and/or level of a target gene or its gene product via RNA interference and/or RNaseH-mediated knockdown. In some embodiments, provided oligonucleotides are capable of directing a decrease in the expression and/or level of a target gene or its gene product by sterically blocking translation after annealing to a target gene mRNA, and/or by altering or interfering with mRNA splicing and/or exon inclusion or exclusion. In some embodiments, provided oligonucleotides can have any format or portion thereof or structural element thereof described herein or known in the art:

[0447] In some embodiments, a PNPLA3 oligonucleotide can have any format or structural element thereof described herein or known in the art.

[0448] In some embodiments, a PNPLA3 oligonucleotide capable of directing a decrease in the expression and/or level of a target gene or its gene product can have any format or structural element thereof described herein or known in the art.

[0449] In some embodiments, a PNPLA3 oligonucleotide, a PNPLA3 oligonucleotide that directs RNA interference, a PNPLA3 oligonucleotide that directs RNase H-mediated knockdown, or a PNPLA3 oligonucleotide that directs both RNA interference and RNaseH-mediated knockdown can have any format or structural element thereof described herein or known in the art.

[0450] Additional non-limiting examples of various ssRNAi formats are embodied by various single-stranded RNAi agents described herein.

[0451] In some embodiments, a provided single-stranded RNAi comprises a 5′-end represented by any 5′-end of any single-stranded RNAi format depicted in FIG. 1 or any single-stranded RNAi agent or single-stranded RNAi format described herein.

[0452] In some embodiments, a provided single-stranded RNAi comprises a 5′-end structure or 5′-end region represented by any 5′-end structure or 5′-end region of any single-stranded RNAi format depicted in FIG. 1 or any single-stranded RNAi agent or single-stranded RNAi format described herein.

[0453] In some embodiments, a provided single-stranded RNAi comprises a 5′-nucleotide represented by any 5′-nucleotide of any single-stranded RNAi format depicted in FIG. 1 or any single-stranded RNAi agent or single-stranded RNAi format described herein.

[0454] In some embodiments, a provided single-stranded RNAi comprises a 5′-nucleoside represented by any 5′-nucleoside of any single-stranded RNAi format depicted in FIG. 1 or any single-stranded RNAi agent or single-stranded RNAi format described herein.

[0455] In some embodiments, a provided single-stranded RNAi comprises a seed region represented by any seed region of any single-stranded RNAi format depicted in FIG. 1 or any single-stranded RNAi agent or single-stranded RNAi format described herein.

[0456] In some embodiments, a provided single-stranded RNAi comprises a post-seed region represented by any post-seed region of any single-stranded RNAi format depicted in FIG. 1 or any single-stranded RNAi agent or single-stranded RNAi format described herein.

[0457] In some embodiments, a provided single-stranded RNAi comprises a post-seed region or component thereof represented by any post-seed region or component thereof of any single-stranded RNAi format depicted in FIG. 1 or any single-stranded RNAi agent or single-stranded RNAi format described herein.

[0458] In some embodiments, a provided single-stranded RNAi comprises a 3′-terminal dinucleotide represented by any 3′-terminal dinucleotide of any single-stranded RNAi format depicted in FIG. 1 or any single-stranded RNAi agent or single-stranded RNAi format described herein.

[0459] In some embodiments, a provided single stranded RNAi comprises a seed region having a pattern of internucleotidic linkages represented by the pattern of internucleotidic linkages of any seed region of any single-stranded RNAi format depicted in FIG. 1 or any single-stranded RNAi agent or single-stranded RNAi format described herein.

[0460] In some embodiments, a provided single-stranded RNAi comprises a post-seed region having a pattern of internucleotidic linkages represented by the pattern of internucleotidic linkages of any post-seed region of any single-stranded RNAi format depicted in FIG. 1 or any single-stranded RNAi agent or single-stranded RNAi format described herein.

[0461] In some embodiments, a provided single-stranded RNAi comprises a post-seed region or component thereof having a pattern of internucleotidic linkages represented by the pattern of internucleotidic linkages of any post-seed region or component thereof of any single-stranded RNAi format depicted in FIG. 1 or any single-stranded RNAi agent or single-stranded RNAi format described herein.

[0462] In some embodiments, a provided single-stranded RNAi comprises a 3′-terminal dinucleotide having a pattern of internucleotidic linkages represented by the pattern of internucleotidic linkages of any 3′-terminal dinucleotide of any single-stranded RNAi format depicted in FIG. 1 or any single-stranded RNAi agent or single-stranded RNAi format described herein.

[0463] In some embodiments, a provided single-stranded RNAi comprises a seed region having a pattern of chemical modifications represented by the pattern of chemical modifications of any seed region of any single-stranded RNAi format depicted in FIG. 1 or any single-stranded RNAi agent or single-stranded RNAi format described herein.

[0464] In some embodiments, a provided single-stranded RNAi comprises a post-seed region having a pattern of chemical modifications represented by the pattern of chemical modifications of any post-seed region of any single-stranded RNAi format depicted in FIG. 1 or any single-stranded RNAi agent or single-stranded RNAi format described herein.

[0465] In some embodiments, a provided single-stranded RNAi comprises a post-seed region or component thereof having a pattern of chemical modifications represented by the pattern of chemical modifications of any post-seed region or component thereof of any single-stranded RNAi format depicted in FIG. 1 or any single-stranded RNAi agent or single-stranded RNAi format described herein.

[0466] In some embodiments, a provided single-stranded RNAi comprises a 3′-terminal dinucleotide having a pattern of chemical modifications represented by the pattern of chemical modifications of any 3′-terminal dinucleotide of any single-stranded RNAi format depicted in FIG. 1 or any single-stranded. RNAi agent or single-stranded RNAi format described herein.

[0467] In some embodiments, a provided single-stranded RNAi comprises a chemical modification represented by any chemical modification of any single-stranded RNAi format depicted in FIG. 1 or any single-stranded RNAi agent or single-stranded RNAi format described herein.

[0468] In some embodiments, a provided single-stranded RNAi comprises a chemical modification represented by any chemical modification of any single-stranded RNAi format depicted in FIG. 1 or described herein, wherein the chemical modification is conjugation of a moiety comprising a phosphate, linker, or a targeting moiety.

[0469] In some embodiments, a provided single-stranded RNAi comprises a chemical modification represented by any chemical modification of any single-stranded RNAi format depicted in FIG. 1 or described herein, wherein the chemical modification is conjugation of a moiety comprising a phosphate, linker, or a targeting moiety, wherein the targeting moiety comprises a GaINAc moiety. In some embodiments, a GaINAc is a protected or de-protected GaINAc.

[0470] In some embodiments, a PNPLA3 oligonucleotide is capable of decreasing the expression, activity and/or level of a target gene and/or a gene product thereof and has the format of any oligonucleotide described herein. In some embodiments, a PNPLA3 oligonucleotide is capable of decreasing the expression, activity and/or level of a target gene and/or a gene product thereof via a RNaseH-mediated mechanism or mechanism related to steric hindrance of translation and has the format of any oligonucleotide described herein. In some embodiments, a PNPLA3 oligonucleotide is capable of decreasing the expression, activity and/or level of a target gene and/or a gene product thereof via a RNaseH-mediated mechanism or mechanism related to steric hindrance of translation and has an asymmetric format. In some embodiments, a PNPLA3 oligonucleotide which has an asymmetric format comprises a first wing, a core and a second wing, wherein the core comprises a region of 5 or more contiguous 2′-deoxy nucleotides which can anneal to a target mRNA and form a structure recognized by RNaseH, and wherein the structure of the first and second wings are different. In some embodiments, the first and second wings differ in their 2′-modifications and/or internucleotidic linkages, or pattern of stereochemistry of the internucleotidic linkages.

[0471] In some embodiments, a PNPLA3 oligonucleotide is capable of decreasing, the expression, activity and/or level of a target gene and/or a gene product thereof comprises a neutral internucleotidic linkage (e.g., a neutral backbone).

[0472] In some embodiments, a PNPLA3 oligonucleotide comprises a neutral backbone. In some embodiments, a PNPLA3 oligonucleotide comprises an internucleotidic linkage which is or comprises a triazole, neutral triazole, or alkyne. In some embodiments, a nucleic acid (including but not limned to a PNPLA3 oligonucleotide) which comprises an internucleotidic linkage which comprises a triazole, neutral triazole, or alkyne, wherein the internucleotidic linkage is stereocontrolled and in the Rp or Sp configuration. In some embodiments, an internucleotidic linkage comprising a triazole has a formula of:

[chemical structure]

In some embodiments, an internucleotidic linkage comprising a neutral triazole has the formula of:

[chemical structure]

where X is O or S, in some embodiments, an internucleotidic linkage comprising an alkyne has the formula of:

[chemical structure]

wherein X is O or S.
In some embodiments, an internucleotidic linkage comprises a cyclic guanidine. In some embodiments, an internucleotidic linkage comprises a cyclic guanidine and has the structure of:

[chemical structure]

In some embodiments, a neutral internucleotidic linkage or internucleotidic linkage comprising a cyclic guanidine is stereochemically controlled. In some embodiments, a neutral internucleotidic linkage improves the activity, delivery anti or stability of a PNPLA3 oligonucleotide and/or the ability of a PNPLA3 oligonucleotide to perform endosomal escape.

[0473] As appreciated by those skilled in the art, in some instances, [symbol] may be used to indicate a connection site

[chemical structure]

in some instances, [symbol] may be used to indicate a stereorandom connection.

[0474] Length of a PNPLA3 Oligonucleotide

[0475] In some embodiments, provided oligonucleotides are capable of directing a decrease in the expression and/or level of a target gene or its gene product. In some embodiments, provided oligonucleotides are capable of directing a decrease in the expression and/or level of a target gene or its gene product via IRNA interference. In some embodiments, provided oligonucleotides are capable of directing a decrease in the expression and/or level of a target gene or its gene product via a biochemical mechanism which does not involve RNA interference or RISC (including, but not limited to, RNaseH-mediated knockdown or steric hindrance of gene expression). In some embodiments, provided oligonucleotides are capable of directing a decrease in the expression and/or level of a target gene or its gene product via RNA interference and/or RNaseH-mediated knockdown. In some embodiments, provided oligonucleotides are capable of directing a decrease in the expression and/or level of a target gene or its gene product by sterically blocking translation after annealing to a target gene mRNA, and/or by altering or interfering with mRNA splicing and/or exon inclusion or exclusion. In some embodiments, provided oligonucleotides can have any length, wherein the length of a PNPLA3 oligonucleotide is such that the oligonucleotide is capable of directing a decrease in the expression and/or level of a target gene or its gene product.

[0476] In some embodiments, the length of a PNPLA3 oligonucleotide is such that the oligonucleotide is capable of directing a decrease in the expression and/or level of a target gene or its gene product.

[0477] In some embodiments, the length of a RNAi agent is such that the RNAi agent is capable of directing RNA interference of a specific target transcript in a sequence-specific manner. In some embodiments, the RNAi agent comprises a sufficient number of nucleobases of sufficient identity to recognize a target transcript. In some embodiments, the RNAi agent is also be of a length suitable for mediating RNAi interference.

[0478] The target portion of the sequence will be at least long enough to serve as a substrate for IRNA-directed cleavage at or near that portion. For example, the target sequence will generally be from about 9-36 nucleotides (“nt”) in length, e.g., about 15-30 nucleotides in length, including all sub-ranges therebetween. Examples of single-stranded RNAi agents of various lengths are shown in Table 1A

[0479] FIG. 1 illustrates non-limiting examples of single-stranded RNAi agents having lengths from 19 to 25. Single-stranded RNAi agents having any of each of these lengths were constructed and found to be capable of knocking down a target gene. Thus, a provided single-stranded RNAi agent can be any of a variety of different lengths.

[0480] Non-limiting examples of formats of ssRNAi agents which are 19 bases long include: Formats 20-21 of FIG. 1.

[0481] Non-limiting examples of formats of ssRNAi agents which are 20 bases long include: Format 19 of FIG. 1.

[0482] 5′-End of a PNPLA3 Oligonucleotide, Including a Single-Stranded RNAi Agent

[0483] In some embodiments, the structure of the 5′-end of a PNPLA3 oligonucleotide is such that the oligonucleotide is capable of directing a decrease in the expression and/or level of a target gene or its gene product.

[0484] In some embodiments, the structure of the 5′-end of a RNAi agent is such that the RNAi agent is capable of directing RNA interference of a specific target transcript in a sequence-specific manner.

[0485] In some embodiments, a provided oligonucleotide can comprise any 5′-end region, 5′-end structure, 5′-end group, 5′-end nucleoside, or 5′-end nucleotide described herein or known in the art. In some embodiments, a provided oligonucleotide capable of directing RNase H-mediated knockdown can comprise any 5′-end region, 5′-end structure, 5′-end group, 5′-end nucleoside, or 5′-end nucleotide described herein or known in the art. In some embodiments, a provided oligonucleotide capable of directing RNA interference can comprise any 5′-end region, 5′-end structure, 5′-end group, 5′-end nucleoside, or 5′-end nucleotide described herein or known in the art. In some embodiments, a provided oligonucleotide capable of directing RNA interference and RNase H-mediated knockdown can comprise any 5′-end region, 5′-end structure. 5′-end group, 5′-end nucleoside, or 5′-end nucleotide described herein or known in the art.

[0486] Among other things, the present disclosure recognizes that 5′-end structures of oligonucleotides, optionally in combination with additional features in accordance with the present disclosure, can provide unexpected advantages. In some embodiments, the present disclosures provides 5′-end groups (corresponding to 5′-HO—CH₂— of ribose found in natural RNA (or deoxy ribose found in natural DNA)) that can surprisingly improve one or more properties and/or activities (e.g., stability, activity, manufacture cost, etc.) of oligonucleotides.

[0487] In some embodiments, 5′-OH groups of provided oligonucleotides are unmodified, i.e., they exist as free OH. In some embodiments, a 5′-end group is 5 Among other things, the present disclosure demonstrates that a provided oligonucleotide with free 5′-OH groups can achieve properties and/or activities (e.g., stability. RNAi activity when used as ss-RNAi agent, etc.) comparable to an otherwise identical oligonucleotide comprising 5′-phosphate (or derivatives thereof) groups, despite reports in the literature that certain activities, e.g., RNAi activity, require presence of 5′-phosphate groups.

[0488] In some embodiments, a 5′-end group comprises no phosphorus atom. In some embodiments, a 5′-end group comprises no phosphate groups, or derivatives or bioisosteres thereof. In some embodiments, a 5′-end group comprises no acidic groups. In some embodiments, a 5′-end grow comprises no carboxyl groups. In some embodiments, a 5′-end comprises no phosphorus atom or carboxyl groups. In some embodiments, a5′-end group is 5 Among other things, the present disclosure demonstrates that provided oligonucleotides with no 5′-phosphates or derivatives or bioisosteres thereof can surprisingly achieve activities comparable to oligonucleotides that have 5′-phosphates but are otherwise identical, for example, in knock-down of mRNA levels of target genes, through RNAi pathways.

[0489] In some embodiments, a 5′-nucleoside unit of a provided oligonucleotide (which includes the sugar and nucleobase moieties but not the internucleotidic linkage between the 5′-nucleoside unit and the second nucleoside unit from the 5′-end) comprises no phosphate group, or derivatives or bioisosteres thereof. In some embodiments, a 5-nucleoside unit comprises no phosphorus atom. In some embodiments, a 5′-nucleoside comprises no acidic groups. In some embodiments, a 5′-nucleoside unit comprises no —COM groups or a salt form thereof.

[0490] In some embodiments, a 5′-end group is or comprises a phosphate group, or a derivative or a bioisostere thereof. In some embodiments, a 5′-nucleoside unit comprises a 5′-group which is a phosphate group, or a derivative or a bioisostere thereof. As appreciated by a person having ordinary skill in the art, a number of such groups are known in the art and can be utilized in accordance with the present disclosure.

[0491] In some embodiments, a 5′-end group is —CH₂—O—P(O)(OH)—(OH) or a salt form thereof. In some embodiments, a provided 5′-nucleoside unit has the structure of

[chemical structure]

or a salt form thereof. In some embodiments, a provided 5′-nucleoside unit has the structure of

[chemical structure]

or a salt form thereof. In some embodiments, X is O. In some embodiments, X is S. In some embodiments. R^{E} is —(R)—CH(CH₃)—O—P(O)(OH)—S—H or a salt form thereof. In some embodiments, R^{E} is —(R)—CH(CH₃)—O—P(O)(OH)—O—H or a salt form thereof. In some embodiments, R^{E} is —(S)—CH(CH₃)—O—P(O)(OH)—S—H or a salt form thereof. In some embodiments, R^{E} is —(S)—CH(CH₃)—O—P(O)(OH)—O—H or a salt form thereof. In some embodiments, a provided 5′-nucleoside unit has the structure of

[chemical structure]

or a salt form thereof. In some embodiments, a provided 5′-nucleoside unit has the structure of

[chemical structure]

or a salt form thereof.

[0492] As readily appreciated by a person having ordinary skill in the art, provided compounds, e.g., oligonucleotides, or partial structures thereof, e.g., 5′-end structures, internucleotidic linkages, etc. of oligonucleotides, may partially, sometimes predominantly, exist as one or more salt forms thereof at certain pH, e.g., physiological pit for example, due to one or more acidic and/or basic moieties therein. In some embodiments, a provided 5′-nucleoside unit may partially, sometimes predominately, exist as one or MOM its salt forms. For example, depending on pH,

[chemical structure]

may exist as

[chemical structure]

or any combinations thereof. Unless explicitly specified otherwise, all salt forms are included when provided compounds or structures are recited.

[0493] In some embodiments, R^{E} is -L- P(O)(XR)₂ or a salt form thereof. In some embodiments, R^{E} is -L- P(O)(XR), or a salt form thereof, wherein each X is independently —O—, —S—, or a covalent bond. In some embodiments, R^{E} is -L- P(O)(OR)₂ or a salt form thereof in some embodiments, R^{E} is -L-P(O)(OR)(SR) or a salt form thereof. In some embodiments, R E is -L- P(O)(OR)(R) or a salt form thereof. In some embodiments, L is a covalent bond, or a bivalent, optionally substituted, linear or branched. C₁₋₆ aliphatic, wherein one or more methylene units are optionally and independently replaced with —O—. —S— or —N(R′)—. In some embodiments. R^{E} is -L- R^{5s}. In some embodiments, R^{E} is —X-L-R. In some embodiments, R^{E} is

[chemical structure]

In some embodiments, X in R^{E} is —C(R)₂—. In some embodiments, X is —O—. In some embodiments, X is —S—. In some embodiments, X is —N(R)—. In some embodiments, L comprises an optionally substituted, bivalent or multivalent

[chemical structure]

group. In some embodiments, L comprises an optionally substituted

[chemical structure]

group. In some embodiments, L comprises a

[chemical structure]

group. In some embodiments, R is independently —H, or an optionally substituted group selected from C C₁₋₁₀ allyl, and C₆₋₁₄ aryl. In some embodiments, R is —H, in some embodiments, is optionally substituted

[chemical structure]

In some embodiments, R^{E} is

[chemical structure]

[0494] Many phosphate derivatives and/or bioisosteres, and 5′-nucleoside units are described in literature and can be utilized in accordance with the present disclosure, for example, some such structures are described in, e.g., US 2016-0194349; US 2016-0186175; US 20130323836, etc. In some embodiments, a 5′ end group R^{E}, or a 5′-nucleoside unit, is described in, for example, Allerson et al. 2005 J. Med. Chem. 48: 901-04; Lima et al. 2012 Cell 150: 883-894; Prakash et al. 2015 Nucl. Acids Res. 43: 2993-3011; and/or Prakash et al, 2016 Bioorg, Med. Chem, Lett. 26: 26: 2817-2820, for example, TAT, T-PO, etc.

[0495] Bridged Morpholinos and cyclohexenyl nucleotides and nucleosides are described in, for example, US patent application publication 2016-0186175, which can be utilized in accordance with the present disclosure.

[0496] Example embodiments of variables are extensively described in the present disclosure. For structures with two or more variables, unless otherwise specified, each variable can independently be any embodiment described herein.

[0497] In some embodiments, a PNPLA3 oligonucleotide capable of directing a decrease in the expression and/or level of a target gene or its gene product can comprise any 5′-end described herein or known in the art.

[0498] In some embodiments, a PNPLA3 oligonucleotide, a PNPLA3 oligonucleotide that directs RNA interference, a PNPLA3 oligonucleotide that directs RNase H-mediated knockdown can comprise any 5′-end described herein or known in the art.

[0499] In some embodiments, a PNPLA3 oligonucleotide, a PNPLA3 oligonucleotide that directs RNase H-mediated knockdown, or a PNPLA3 oligonucleotide that directs both RNA interference and RNase H-mediated knockdown can comprise any 5′-end described herein or known in the art.

[0500] In some embodiments, the 5′-end of a provided single-stranded RNAi agent comprises a phosphorus-comprising moiety (e.g., a 5′-end comprises a phosphorus). Non-limiting examples of ssRNAi formats wherein the 5′-end comprises a phosphorus-comprising moiety include Formats 1-15, 20-21, 23-31, 80-82, 92-95, 97-102, and 104-107 of FIG. 1.

[0501] In some embodiments, the 5′-end of a provided single-stranded RNAi agent does not comprise a phosphorus-comprising moiety (e.g., a 5′-end comprises a phosphorus). Non-limiting examples of ssRNAi formats wherein the 5′-end does not comprise a phosphorus-comprising moiety include Formats 16-19, 22, 32-79, 83-91, 96, and 103 of FIG. 1.

[0502] In some embodiments, the 5-end of a provided single-stranded RNAi agent comprises a moiety comprising a phosphate, such as a phosphodiester, phosphorothioate, phosphorodithioate, phosphonate, or other moiety similar or identical to a phosphate-comprising internucleotidic linkage. In some embodiments, the 5′-end of a provided single-stranded RNAi agent comprises a moiety comprising a phosphate, but which is not a phosphodiester, such a moiety in some embodiments is referred to as a phosphate mimic, modified phosphate or phosphate analog.

[0503] In some embodiments, the 5′-end of a provided single-stranded RNAi agent does not comprise a moiety comprising a phosphate.

[0504] In some embodiments of a single-stranded RNAi agent, a 5′ end structure has a structure selected from: 5′-(R)-Me OH T, 5′-(R)-Me PO T, 5′-(R)-Me PS T, 5′-(R)-Me PH T, 5′-(S)-Me OH T, 5′-(S)-Me PO T, 5′-(S)-Me PS T, and 5′-(S)—PH T.

[0505] In some embodiments of a provided single-stranded RNAi agent, which comprise a phosphorus-comprising moiety at the 5′-end structure which is represented by a structure selected from the Formula IV-a (Mod022 also known as C3 PO and n-propyl), IV-b (Mod022*), IV-c (POMod023*), IV-d (PSMod023*), and IV-e (PHMod023*):

[chemical structure]

[0506] In some embodiments of a provided single-stranded RNAi agent, which comprise a phosphorus-comprising moiety at the 5-end structure is represented by a structure selected of the structure of Formula IV-f (also known as n-propyl, C3 PO or Mod022):

[chemical structure]

[0507] wherein 5′ indicates the attachment point to the 5′ carbon of a sugar.

[0508] In some embodiments of a provided single-stranded RNAi agent, which comprise a phosphorus-comprising moiety at the 5′-end structure is represented by a structure selected of the following structure (also known as C3 PS or Mod022*):

[chemical structure]

[0509] wherein 5′ indicates the attachment point to the 5′ carbon of a sugar (e.g., of N1).

[0510] In some embodiments of a provided single-stranded RNAi agent, which comprise a phosphorus-comprising moiety at the 5′-end structure is represented by a structure selected of the structure of Formula IV-g (also known as Dimethyl C3 or C3 dimethyl PS or Mod023*):

[chemical structure]

[0511] wherein 5′ indicates the attachment point to the 5′ carbon of a sugar (e.g., of N1).

[0512] In some embodiments, a single-stranded RNAi agent comprises a 5′-end structure which is selected from any of PO (phosphorodiester), Formula IV-h; PH (H-Phosphonate), Formula IV-i; and PS (Phosphorothioate), Formula IV-j:

[chemical structure]

In some embodiments of a provided single-stranded RNAi agent, which comprise a phosphorus-comprising moiety at the 5′-end structure is represented by a structure selected from any of the following:

[chemical structure]

[0513] wherein 5′ indicates the attachment point to the 5′ carbon of a sugar (e.g., of N1).

[0514] In some embodiments, P in any of Formula IV-a to IV-j is stereorandom or stereodefined as in the Sp or Rp configuration.

[0515] In some embodiments, a 5′-end structure is selected from any of: a phosphate, a phosphate analogue, 5′-monophosphate ((HO)2(O)P—O-5′), 5′-diphosphate ((HO)2(O)P—O—P(HO)(O)—O-5′), 5′-triphosphate ((HO)2(O)P—O—(HO)(O)P—O—P(HO)(O)—O-5′), 5′-guanosine cap (7-methylated or non-methylated) (7m-G-O-5′-(HO)(O)P—O—(HO)(O)P—O—P(HO)(O)—O-5′), 5′-adenosine cap (Appp), and any modified or unmodified nucleotide cap structure (N—O-5′-(HO)(O)P—O—(HO)(O)P—O—P(HO)(O)—O-5′), 5′-monothiophosphate (phosphorate; (HO)2(S)P—O-5′), 5′-monodithiophosphate (phosphorodithioate; (HO)(HS)(S)P—O-5′), 5′-phosphorothiolate ((HO)2(O)P—S-5′); any additional combination of oxygen/sulfur replaced monophosphate, diphosphate and triphosphates (e.g. 5′-alpha-thiotriphosphate, 5′-gamma-thiotriphosphate, etc.), 5′-phosphoramidates ((HO)2(O)P—NH-5′, (HO)(NH2)(O)P—O-5′), 5′-alkylphosphonates (R=alkyl=methyl, ethyl, isopropyl, propyl, etc., e.g. RP(OH)(O)—O-5′-, (OH)2(O)P-5′-CH2-), 5′-alkylether phosphonates (R=alkylether=methoxy methyl (MeOCH2-), ethoxy methyl, etc., e.g. RP(OH)(O)—O-5′-).

[0516] In some embodiments, a 5′-end comprising a phosphorus-comprising moiety can have particular advantages, in that the single-stranded RNAi agents comprising thein may be more active in RNA interference.

[0517] In some embodiments, a 5′ end structure has a structure of a 5′-nucleotide or a modified 5′-nucleotide, a 5′-nucleotide analog, a 5′-nucleoside or a modified 5′-nucleoside or a 5′-nucleoside analog.

[0518] In some embodiments, a 5′ end structure, has a structure of any of: a 5′-guanosine cap, a 5′-adenosine cap, a 5′-monothiophosphate, a 5′-monodithiophosphate, a 5′-phosphorothiolate, a 5′-phosphoramidate, a 5′-alkylphosphonate, and a 5′-alkylether phosphonate; a 5′-monophosphate, a 5′-diphosphate, and a 5′-triphosphate; 5′-triphosphate; a monophosphate, a diphosphate, or a triphosphate in which at least one oxygen atom of the monophosphate, diphosphate, or triphosphate is replaced with a sulfur atom; 5′-alpha-thiotriphosphate and 5′-gamma-thiotriphosphate; alkylphosphonate; alkylphosphonate has the formula: RP(OH)(O)—O-5′ or (OH)₂(O)P-5′-CH₂—, wherein R is a C₁-C₃ alkyl; alkylether phosphonate; or alkylether phosphonate of the formula: RP(OH)(O)—O-5% wherein R is an alkylether.

[0519] Various 5′-nucleosides are described in, for example, U.S. patent application Ser. No. 14/959,714, published as US 2016-0194349 A1; U.S. patent application Ser. No. 14/983,907, published as US 2016-0186175 A1; or U.S. patent application Ser. No. 13/696,796, published as US 20130323836.

[0520] In some embodiments, a 5′-end structure is a vinylphosphonate.

[0521] In certain embodiments, oligomeric compounds are provided wherein said 5′-terminal compound has Formula VIII-c wherein G is F, OCH₃ or O(CH₂)₂—OCH₃.

[0522] In some embodiments, a 5′ end structure has a structure selected from: 5′-(R)-Me OH T, 5′-(R)-Me PO T, 5′-(R)-Me PS T, 5′-(R)-Me PH T, 5′-(S)-Me T. 5′-(S)-Me PO T. 5′-(S)-Me PS T, and 5′-(S)—PH T.

[0523] In some embodiments, a 5′ end structure has the structure of 5′-(R)-Me OH T.

[0524] In some embodiments, a 5′ end structure has the structure of 5′-(R)-Me PO T.

[0525] In some embodiments, a 5′ end structure has the structure of 5′-(R)-Me PS T.

[0526] In some embodiments, a 5′ end structure has the structure of 5′-(R)-Me PH T.

[0527] In some embodiments, a 5′ end structure has the structure of 5′-(S)-Me OH T.

[0528] In some embodiments, a 5′ end structure has the structure of 5′-(S)-Me PO T.

[0529] In some embodiments, a. 5′ end structure has the structure of 5′-(S)-Me PS T.

[0530] In some embodiments of a single-stranded. RNAi agent, a 5′ end structure has the structure of 5′-(R)-Me PO T.

[0531] In some embodiments of a single-stranded RNAi agent, a 5 end structure has the structure of 5′-(R)-Me PS T.

[0532] In some embodiments of a single-stranded RNAi agent, a 5′ end structure has the structure of 5′-(R)-Me PH T.

[0533] In some embodiments of a single-stranded RNAi agent, a 5 end structure has the structure of 5′-(S)-Me OH T.

[0534] In some embodiments of a single-stranded RNAi agent, a 5 end structure has the structure of 5′-(S)-Me PO T.

[0535] In some embodiments of a single-stranded RNAi agent, a 5 end structure has the structure of 5′-(S)-Me PS T.

[0536] In some embodiments of a single-stranded RNAi agent, a 5′ end structure has the structure of 5′-(S)-Me PH T.

[0537] In some embodiments, a 5′ end structure has the structure of 5′-(S)-Me PH T. In addition, some references such as EP 1520022 B1, paragraph 6, have reported that a 5′ phosphate is required at the target-complementary strand (e.g., the antisense strand) of a siRNA duplex for RISC activity. U.S. Pat. No. 8,729,036, column 2, also noted that 5′ phosphates are reported to be essential for RNA interference. U.S. Pat. No. 8,729,036, column 3, also reported that a 5′ phosphate was required for single-stranded antisense siRNAs to trigger RNAi in HeLa 5100 extract. However, the present disclosure has demonstrated that various single-stranded RNAi agents which do not comprise a 5′ phosphate are capable of directing RNA interference.

[0538] In some embodiments, a 5′-end comprises a phosphate-comprising moiety such as TAP or T-PO, or any other suitable RNAi agent 5′-end compound as described in, for example, Allerson et al. 2005 J. Med. Chem. 48: 901-04; Lima et al. 2012 Cell 150: 883-894; Prakash et al. 2015 Nucl. Acids Res. 43: 2993-3011; and/or Prakash et al. 2016 Bioorg. Med. Chem. Lett. 26: 26: 2817-2820.

[0539] In some embodiments, a5′-end which does not comprise a phosphorus-comprising moiety can have particular advantages, in that the single-stranded RNAi agent can be easier to synthesize, and it may not be necessary to protect the phosphorus-comprising moiety from degradation. In some embodiments, a 5′-end of a provided single-stranded RNAi agent which does not comprise a phosphorus-comprising moiety comprises a moiety which can act as a substrate for a mammalian kinase which, inside a target cell, is able to attach a phosphorus-comprising moiety at the 5′-end of the single-stranded RNAi agent.

[0540] In some embodiments, a 5′-end does not comprise a phosphorus-comprising moiety.

[0541] In some embodiments of a single-stranded RNAi agent, the single-stranded RNAi agent comprises a 5′ terminal OH, and the first nucleoside is 2′-deoxy.

[0542] In some embodiments of a single-stranded RNAi agent, the single-stranded RNAi agent comprises a 5′ terminal OH, and the first nucleoside is 2′-deoxy T.

[0543] In some embodiments of a single-stranded RNAi agent, the single-stranded RNAi agent comprises a 5′ terminal OH, and the first nucleoside is 2′-deoxy U.

[0544] In some embodiments of a single-stranded RNAi agent, the single-stranded RNAi agent comprises a 5′ terminal OH, and the first nucleoside is 2′-deoxy A.

[0545] In some embodiments of a single-stranded RNAi agent, the single-stranded RNAi agent comprises a 5′ terminal OH, and the first nucleoside is 2′-deoxy G.

[0546] In some embodiments of a single-stranded RNAi agent, the single-stranded RNAi agent comprises a 5′ terminal OH, and the first nucleoside is 2′-deoxy C.

[0547] In some embodiments of a single-stranded RNAi agent, the single-stranded RNAi agent comprises a 5′ terminal OH, and the first nucleoside is 2′-deoxy.

[0548] In some embodiments of a single-stranded RNAi agent, the single-stranded RNAi agent comprises a 5′ terminal OH, and the first nucleoside is 2′-deoxy T. In some embodiments of a single-stranded RNAi agent, the single-stranded RNAi agent comprises a 5′ terminal OH, and the first nucleoside is 2′-deoxy U.

[0549] In some embodiments of a single-stranded RNAi agent, the single-stranded RNAi agent comprises a 5′ terminal 0H, and the first nucleoside is 2′-deoxy A. In some embodiments of a single-stranded RNAi agent, the single-stranded RNAi agent comprises a 5′ terminal OH, and the first nucleoside is 2′-deoxy G.

[0550] In some embodiments of a single-stranded RNAi agent, the single-stranded RNAi agent comprises a 5′ terminal OH, and the first nucleoside is 2′-deoxy C.

[0551] In some embodiments of a single-stranded RNAi agent, the single-stranded RNAi agent comprises a 5′ terminal OH, and the first nucleoside is 2′-OMe.

[0552] In some embodiments of a single-stranded RNAi agent, the single-stranded RNAi agent comprises a 5′ terminal OH, and the first nucleoside is 2′-OMe T.

[0553] In some embodiments of a single-stranded RNAi agent, the single-stranded RNAi agent comprises a 5′ terminal OH, and the first nucleoside is 2′-OMe U.

[0554] In some embodiments of a single-stranded RNAi agent, the single-stranded RNAi agent comprises a 5′ terminal OH, and the first nucleoside is 2′-OMe A.

[0555] In some embodiments of a single-stranded RNAi agent, the single-stranded RNAi agent comprises a 5′ terminal OH, and the first nucleoside is 2′-OMe G.

[0556] In some embodiments of a single-stranded RNAi agent, the single-stranded RNAi agent comprises a 5′ terminal OH, and the first nucleoside is 2′-OMe C.

[0557] In some embodiments of a single-stranded RNAi agent, the single-stranded RNAi agent comprises a 5′ terminal OH, and the first nucleoside is 2′-OMe.

[0558] In some embodiments of a single-stranded RNAi agent, the single-stranded RNAi agent comprises a 5′ terminal OH, and the first nucleoside is 2′-OMe T.

[0559] In some embodiments of a single-stranded RNAi agent, the single-stranded RNAi agent comprises a 5′ terminal OH, and the first nucleoside is 2′-OMe U. In some embodiments of a single-stranded RNAi agent, the single-stranded RNAi agent comprises a 5′ terminal OH, and the first nucleoside is 2′-OMe A.

[0560] In some embodiments of a single-stranded RNAi agent, the single-stranded RNAi agent comprises a 5′ terminal OH, and the first nucleoside is 2′-OMe G.

[0561] In some embodiments of a single-stranded RNAi agent, the single-stranded RNAi agent comprises a 5′ terminal OH, and the first nucleoside is 2′-OMe C.

[0562] In some embodiments of a single-stranded RNAi agent, the single-stranded RNAi agent comprises a 5′ terminal OH, and the first nucleoside is 2′-F.

[0563] In some embodiments of a single-stranded RNAi agent, the single-stranded RNAi agent comprises a 5′ terminal OH, and the first nucleoside is 2′-F T.

[0564] In some embodiments of a single-stranded RNAi agent, the single-stranded RNAi agent comprises a 5′ terminal OH, and the first nucleoside is 2′-F U.

[0565] In some embodiments of a single-stranded RNAi agent, the single-stranded RNAi agent comprises a 5′ terminal OH, and the first nucleoside is 2′-F A.

[0566] In some embodiments of a single-stranded RNAi agent, the single-stranded RNAi agent comprises a 5′ terminal OH, and the first nucleoside is 2′-F G.

[0567] In some embodiments of a single-stranded RNAi agent, the single-stranded RNAi agent comprises a 5′ terminal OH, and the first nucleoside is 2′-F C.

[0568] In some embodiments of a single-stranded RNAi agent, the single-stranded RNAi agent comprises a 5′ terminal OH, and the first nucleoside is 2′-F.

[0569] In some embodiments of a single-stranded RNAi agent, the single-stranded RNAi agent comprises a 5′ terminal OH, and the first nucleoside is 2′-F T.

[0570] In some embodiments of a single-stranded RNAi agent, the single-stranded RNAi agent comprises a 5′ terminal OH, and the first nucleoside is 2′-F U.

[0571] In some embodiments of a single-stranded. RN agent, the single-stranded RNAi agent comprises a 5′ terminal OH, and the first nucleoside is 2′F A. In some embodiments of a single-stranded RNAi agent, the single-stranded RNAi agent comprises a 5′ terminal OH, and the first nucleoside is 2′-F G. In some embodiments of a single-stranded RNAi agent, the single-stranded RNAi agent comprises a 5′ terminal OH, and the first nucleoside is 2′-F C.

[0572] In some embodiments of a single-stranded RNAi agent, the single-stranded RNAi agent comprises a 5′ terminal phosphate, and the first nucleoside is 2′-deoxy.

[0573] In some embodiments of a single-stranded RNAi agent, the single-stranded RNAi agent comprises a 5′ terminal phosphate, and the first nucleoside is 2′-deoxy T.

[0574] In some embodiments of a single-stranded RNAi agent, the single-stranded RNAi agent comprises a 5′ terminal phosphate, and the first nucleoside is 2′-deoxy U.

[0575] In some embodiments of a single-stranded RNAi agent, the single-stranded RNAi agent comprises a 5′ terminal phosphate, and the first nucleoside is 2′-deoxy A.

[0576] In some embodiments of a single-stranded RNAi agent, the single-stranded RNAi agent comprises a 5′ terminal phosphate, and the first nucleoside is 2′-deoxy G.

[0577] In some embodiments of a single-stranded RNAi agent, the single-stranded RNAi agent comprises a 5′ terminal phosphate, and the first nucleoside is 2′-deoxy C.

[0578] In some embodiments of a single-stranded RNAi agent, the single-stranded RNAi agent comprises a 5′ terminal phosphate and the first nucleoside is 2′-deoxy.

[0579] In some embodiments of a single-stranded RNAi agent, the single-stranded RNAi agent comprises a 5′ terminal phosphate, and the first nucleoside is 2′-deoxy T.

[0580] In some embodiments of a single-stranded RNAi agent, the single-stranded RNAi agent comprises a 5′ terminal phosphate, and the first nucleoside is 2′-deoxy U.

[0581] In some embodiments of a single-stranded RNAi agent, the single-stranded RNAi agent comprises a 5′ terminal phosphate, and the first nucleoside is 2′-deoxy A. In some embodiments of a single-stranded RNAi agent, the single-stranded RNAi agent comprises a 5′ terminal phosphate, and the first nucleoside is 2′-deoxy G.

[0582] In some embodiments of a single-stranded RNAi agent, the single-stranded RNAi agent comprises a 5′ terminal phosphate, and the first nucleoside is 2′-deoxy C.

[0583] In some embodiments of a single-stranded RNAi agent, the single-stranded RNAi agent comprises a 5′ terminal phosphate, and the first nucleoside is 2′-F.

[0584] In some embodiments of a single-stranded RNAi agent, the single-stranded RNAi agent comprises a 5′ terminal phosphate, and the first nucleoside is 2′-F T.

[0585] In some embodiments of a single-stranded RNAi agent, the single-stranded RNAi agent comprises a 5′ terminal phosphate, and the first nucleoside is 2′4′ U.

[0586] In some embodiments of a single-stranded RNAi agent, the single-stranded RNAi agent comprises a 5′ terminal phosphate, and the first nucleoside is 2′-F A.

[0587] In some embodiments of a single-stranded RNAi agent, the single-stranded RNAi agent comprises a 5′ terminal phosphate, and the first nucleoside is 2′-F G.

[0588] In some embodiments of a single-stranded RNAi agent, the single-stranded RNAi agent comprises a 5′ terminal phosphate, and the first nucleoside is 2′-F C.

[0589] In some embodiments of a single-stranded RNAi agent, the single-stranded RNAi agent comprises a 5′ terminal phosphate, and the first nucleoside is 2′-F.

[0590] In some embodiments of a single-stranded RNAi agent, the single-stranded RNAi agent comprises a 5′ terminal phosphate, and the first nucleoside is 2′-F T.

[0591] In some embodiments of a single-stranded RNAi agent, the single-stranded RNAi agent comprises a 5′ terminal phosphate, and the first nucleoside is 2′-F U. In some embodiments of a single-stranded RNAi agent, the single-stranded RNAi agent comprises a 5′ terminal phosphate, and the first nucleoside is 2′-F A. In some embodiments of a single-stranded RNAi agent, the single-stranded RNAi agent comprises a 5′ terminal phosphate, and the first nucleoside is 2′-F G.

[0592] In some embodiments of a single-stranded RNAi agent, the single-stranded RNAi agent comprises a 5′ terminal phosphate, and the first nucleoside is 2′-F C.

[0593] In some embodiments of a single-stranded RNAi agent, the single-stranded RNAi agent comprises a 5′ terminal phosphate, and the first nucleoside is 2′-OMe.

[0594] In some embodiments of a single-stranded RNAi agent, the single-stranded RNAi agent comprises a 5′ terminal phosphate, and the first nucleoside is 2′-OMe T.

[0595] In some embodiments of a single-stranded RNAi agent, the single-stranded RNAi agent comprises a 5′ terminal phosphate, and the first nucleoside is 2′-OMe U.

[0596] In some embodiments of a single-stranded RNAi agent, the single-stranded RNAi agent comprises a 5′ terminal phosphate, and the first nucleoside is 2′-OMe A.

[0597] In some embodiments of a single-stranded RNAi agent, the single-stranded RNAi agent comprises a 5′ terminal phosphate, and the first nucleoside is 2′-OMe G.

[0598] In some embodiments of a single-stranded RNAi agent, the single-stranded RNAi agent comprises a 5′ terminal phosphate, and the first nucleoside is 2′-OMe C.

[0599] In some embodiments of a single-stranded RNAi agent, the single-stranded RNAi agent comprises a 5′ terminal phosphate, and the first nucleoside is 2′-OMe. In some embodiments of a single-stranded RNAi agent, the single-stranded RNAi agent comprises a 5′ terminal phosphate, and the first nucleoside is 2′-OMe T.

[0600] In some embodiments of a single-stranded RNAi agent, the single-stranded RNAi agent comprises a 5′ terminal phosphate, and the first nucleoside is 2′-OMe U. In some embodiments of a single-stranded RNAi agent the single-stranded RNAi agent comprises a 5′ terminal phosphate, and the first nucleoside is 2′-OMe A. In some embodiments of a single-stranded RNAi agent, the single-stranded RNAi agent comprises a 5′ terminal phosphate, and the first nucleoside is 2′-OMe G.

[0601] In some embodiments of a single-stranded RNAi agent, the single-stranded RNAi agent comprises a 5′ terminal phosphate, and the first nucleoside is 2′-OMe C.

[0602] In some embodiments, a PNPLA3 oligonucleotide comprises an additional component which binds to ASPGR. In some embodiments, the additional component is on the 5′ end of the oligonucleotide.

[0603] In some embodiments, a PNPLA3 oligonucleotide comprises an additional component which is or comprises a compound of Formula (K)

[chemical structure]

wherein R is —CN, —CH₂—CN; C≡CH, —CH₂—N₃, —CH₂—NH₂, —CH₂—N(R)—S(O)₂—R, —CH₂—CO₂H, —CO₂H, —CH₂—OH, —CH₂—SH, —CH═CH—R, —CH₂—R, —CH₂—S—R, —CH₂—N(R)—R, —CH₂—N(R)—C(O)—R, —CH₂—N(R)—C(O)—O—R, —CH₂—N(R)—C(O)—N(R)—R, —CH₂—O—R, —CH₂—O—C(O)—R, —CH₂—O—C(O)—N(R)—R, —CH₂—O—C(O)—O—R, —CH₂—S(O)—R, —CH₂—S(O)₂—R, —CH₂—S(O)₂—N(R)—R, —C(O)—NH₂, —C(O)—O—R, —C(O)—N(R)—R, or aryl or heteroaryl, wherein the aryl or heteroaryl is optionally substituted with R, or R is —Z—X—Y wherein X is a linker or a drug delivery system, Y is absent or is a ligand selected from the group consisting of a small molecule, an amino acid sequence, a nucleic acid sequence, an antibody, an oligomer, a polymer, genetically derived material, a liposome, a nanoparticle, dye, fluorescent probe, or a combination thereof, and Z is absent or is —C≡C—, —CH═CH—, —CH₂—, —CH₂—O—, —C(O)—N(R)—, —CH₂—S—, —CH₂—S(O)—, —CH₂—S(O)₂—, —CH₂—S(O)₂—N(R)—, —C(O)—O—, —CH₂—N(R)—, —CH₂_N(R)—C(O)—, —CH₂—N(R)—S(O)₂—, —CH₂—N(R)—C(O)—O—, —CH₂—N(R)—C(O)—N(R)—, —CH₂—O—C(O)—, —CH₂—O—C(O)—N(R)—, —CH₂—O—C(O)—O—, or aryl or heteroaryl, wherein the aryl or heteroaryl is optionally substituted with R; R⁶² is —OH, —N₃, —N(R)₂, —N(R)—C(O)—R —N(R)—C(O)—N(R)₂, —N(R)—C(O)—OR, tetrazole, or triazole, wherein the tetrazole and triazole are optionally substituted with R,
and wherein when R is —CH₂—OH, R is —N₃, —N(R)₂, —N(R)—C(O)—R, —N(R)—C(O)—N(R)₂ —N(R)—C(O)—OR, tetrazole, or triazole, wherein the tetrazole and triazole are optionally substituted with R; each R is independently —H, —(C₁-C₅)alkyl, halo-substituted (C₁-C₅)alkyl, or (C₃-C₆)cycloalkyl, wherein a —CH₂— group of the alkyl or cycloalkyl may be replaced with a heteroatom group selected from —O—, —S—, and —N(R)— and —CH 3 of the alkyl may be replaced with a heteroatom group selected from —N(R)₂, —OR, and —S(R) wherein the heteroatom groups are separated by at least 2 carbon atoms;
each R is independently —H, —(C₁-C₂₀)alkyl, or (C₃-C₆)cycloalkyl wherein one to six —CH₂— groups of the alkyl or cycloalkyl separated by at least two carbon atoms may be replaced with —O—, —S—, or —N(R)—, and —CH₃ of the alkyl may be replaced with a heteroatom group selected from —N(R)₂, —OR, and —S(R) wherein the heteroatom groups axe separated by at least 2 carbon atoms; and wherein the alkyl and cycloalkyl may be substituted with one to six halo atoms; and
each R is independently —H, (C₃-C₂₀)cycloalkyl or (C₁-C₂₀)alkyl wherein one to six —CH₂— groups of the alkyl or cycloalkyl separated by at least two carbon atoms may be replaced with —O—, —S—, or —N(R)—, and —CH₃ of the alkyl may be replaced with a heteroatom group selected from —N(R)₂, —OR, and —S(R) wherein the heteroatom groups are separated by at least 2 carbon atoms; and wherein the alkyl and cycloalkyl may be substituted with one to six halo atoms.

[0604] In some embodiments, a PNPLA3 oligonucleotide comprises an additional component which is or comprises a compound of Formula (M)

[chemical structure]

wherein R is —CN, —CH₂—CN, —C≡CH, —CH₂—N₃, —CH₂—NH₂, —CH₂—N(R)—S(O)₂—R, —CH₂—CO₂H, —CO₂H, —CH₂—OH, —CH₂—SH, —CH═H—R, —CH₂—R, —CH₂—S—R, —CH₂—N(R)—R, —CH₂—N(R)—C(O)—R, —CH₂—N(R)—C(O)—O—R, —CH₂—N(R)—C(O)—N(R)—R, —CH₂—O—R, —CH₂—O—C(O)—R, —CH₂—O—C(O)—N(R)—R, —CH₂—O—C(O)—O—R, —CH₂—S(O)—R, —CH₂—S(O)₂—R, —CH₂—S(O)₂—N(R)—R, —C(O)—NH₂, —C(O)—O—R, —C(O)—N(R)—R, or aryl or heteroaryl, wherein the aryl or heteroaryl is optionally substituted with R,
or R is —Z—X—Y, —Z—Y, —X—Y, —X, —Y, or —Z—X wherein X is a linker or a drug delivery system, Y is R or is a ligand selected from the group consisting of a small molecule, an amino acid sequence, a nucleic acid sequence, an antibody, an oligomer, a polymer, genetically derived material, a Liposome, a nan ° panicle, dye, fluorescent probe, or a combination thereof, and Z is —C≡C—, —CH═—CH—, —CH₂—, —CH₂—O—, —C(O)—N(R)—, —CH₂—S—, —CH₂—S(O)—, —CH₂—S(O)₂—, —CH₂—S(O)₂—N(R)—, —C(O)—O—, —CH₂—N(R)—, —CH₂, N(R)—C(O)—, —CH₂—N(R)—S(O)₂—, —CH_{Z}—N(R)—C(O)—O—, —CH₂—N(R)—C(O)N(R)—, —CH₂—O—C(O)—, —CH₂—O—C(O)—N(R)—, —CH₂—O—C(O)—O—, or aryl or heteroaryl, wherein the aryl or heteroaryl is optionally substituted with R;
R is —OH, —N₃, —N(R)₂, —N(R)—C(O)—R, —N(R)—C(O)—N(R)₂, —N(R)—C(O)—OR, —N(R)—S(O)₂—R, tetrazole, or triazole, wherein the tetrazole and triazole are optionally substituted with R
and wherein when R is —CH₂—OH, R is —N₃, —N(R)₂, —N(R)—C(O)—R′ —N(R)—C(O)—N(R)₂′—N(R)—C(O)—OR, N(R)—S(O)₂—R, tetrazole, or triazole, wherein the tetrazole and triazole are optionally substituted with R;
each R is independently —H, —(C₁-C₅)alkyl, halo-substituted (C₁-C₅)alkyl, or (C₃-C₆)cycloalkyl, wherein one or more —CH₂— groups of the alkyl or cycloalkyl may each be replaced with a heteroatom group independently selected from —O—, —S—, and —N(R)— and —CH₃ of the alkyl may be replaced with a heteroatom group selected from —N(R)₂, —OR, and —S(R) wherein the heteroatom groups are separated by at least 2 carbon atoms;
each R is independently —H, —(C₁-C₂₀)alkyl, or (C₃-C₆)cycloalkyl wherein one to six —CH₂— groups of the alkyl or cycloalkyl separated by at least two carbon atoms may each be replaced with a heteroatom independently selected from —O—, —S—, or —N(R)—, and —CH₃ of the alkyl may be replaced with a heteroatom group selected from —N(R)₂, —OR, and —S(R) wherein the heteroatom groups are separated by at least 2 carbon atoms; and wherein the alkyl and cycloalkyl may be substituted with halo atoms;
each R is independently —H, (C₃-C₂₀)cycloalkyl or (C₁-C₆₀)alkyl wherein one to six —CH₂— groups of the cycloalkyl or one to 20 —CH₂— groups of the alkyl may each be replaced with heteroatoms independently selected from O—, —S—, and —N(R)— wherein the heteroatoms are separated by at least two carbon atoms, and —CH₃ of the alkyl may be replaced with a heteroatom group selected from —N(R)₂, —OR, and —S(R) wherein the heteroatom groups are separated by at least 2 carbon atoms; and wherein the alkyl and cycloalkyl may be substituted with halo atoms; and
each R is independently H, —C≡CH, —C═CH₂, —CH₃, —N₃, —N(R)₂, —OH, —S(O)—(R), —S(O)₂—(R), —C(O)—OH, —S—S-aryl, —S—S-heteroaryl, heterocycyl, aryl or heteroaryl, wherein each aryl or heteroaryl is optionally substituted with R.

[0605] In some embodiments, R⁶¹ or R⁷¹ is —X—Y, and/or R⁶² or R⁷² is —NH—C(O)—CH₃.

[0606] In some embodiments, a PNPLA3 oligonucleotide comprises an additional component selected from the group consisting of:
[0607] benzyl (4-((2-((1-(1-((1S,2R,3R,4R,5S)-4 acetamido-2,3-dihydroxy-6,8-dioxabicyclo[3.2.1]octan-1-yl)-2,5,8,11-tetraoxatridecan-13-yl)-1H-1,2,3-triazol-4-yl)methoxy)ethyl)amino)-4-oxobutyl)carbamate,
[0608] benzyl (4-((1,3-bis((1-(1-((1S,2R,3R,4R,5S)-4-acetamido-2,3-dihydroxy-6,8-dioxabicyclo[3.2.1]octan-1-yl)-2,5,8,11-tetraoxatridecan-13-yl)-1H-1,2,3-triazol-4-yl)methoxy)propan-2-yl)amino)-4-oxobutyl)carbonate,
[0609] benzyl (4-((1,3-bis((1-(1-((1S,2R,3R,4R,5S)-4-acetamido-2,3-dihydroxy-6,8-dioxabicyclo[3.2.1]octan-1-yl)-2,5,8,11-tetraoxatridecan-13-yl)-1H-1,2,3-triazol-4-yl)methoxy)-2-(((1-(1-((1S,2R,3R,4R,5S)-4-acetamido-2,3-dihydroxy-6,8-dioxabicyclo[3.2.1]octan-1-yl)-2,5,8,11-tetraoxatridecan-13-yl)-1H-1,2,3-triazol-4-yl)methoxy)methyl)propan-2-yl)amino)-4-oxobutyl)carbamate,
[0610] N-(2-((1-(1-((1S,2R,3R,4R,5S)-4-acetamido-2,3-dihydroxy-6,8-dioxabicyclo[3.2.1]octan-1-yl)-2,5,8,11-tetraoxatridecan-13-yl)-1H-1,2,3-triazol-4-yl)methoxy)ethyl)-4-aminobutanamide,
[0611] 4-amino-N-{1,3-bis[(1-{1-[(1S,2R,3R,4R,5S)-4-(acetylamino)-2,3-dihydroxy-6,8-dioxabicyclo[3.2.1]oct-1-yl]-2,5,8,11-tetraoxatridecan-13-yl}-1H-1,2,3-triazol-4-yl)methoxy]propan-2-yl}butanamide,
[0612] 4-amino-N-(1,3-bis[(1-{1-[(1S,2R,3R,4R,5S)-4-(acetylamino)-2,3-dihydroxy-6,8-dioxabicyclo[3.2.1]oct-1-yl]-2,5,8,11-tetraoxatridecan-13-yl}-1H-1,2,3-triazol-4-yl)methoxy]-2-{[(1-{1-[(1S,2R,3R,4R,5S)-4-(acetylamino)-2,3-dihydroxy-6,8-dioxabicyclo[3.2.1]oct-1-yl]-2,5,8,11-tetraoxatridecan-13-yl}-1H-1,2,3-triazol-4-yl)methoxy]methyl}propan-2-yl)butanamide,
[0613] 4-amino-N-[1,31-bis(1-{[(1S,2R,3R,4R,5S)-4-(acetylamino)-2,3-dihydroxy-6,8-dioxabicyclo[3.2.1]oct-1-yl]methyl}-1H-1,2,3-triazol-4-yl)-2,6,10,14,18,22,26,30-octaoxahentriacontan-16-yl]butanamide,
[0614] 4-amino-N-{1,31-bis(1-{[(1S,2R,3R,4R,5S)-4-(acetylamino)-2,3-dihydroxy-6,8-dioxabicyclo[3.2.1]oct-1-yl]methyl}-1H-1,2,3-triazol-4-yl)-16-[15-(1-{[(1S,2R,3R,4R,5S)-4-(acetylamino)-2,3-dihydroxy-6,8-dioxabicyclo[3.2.1]oct-1-yl]methyl}-1H-1,2,3-triazol-4-yl)-2,6,10,14-tetraoxapentadec-1-yl]-2,6,10,14,18,22,26,30-octaoxahentriacontan-16-yl}butanamide,
[0615] N-{(1S,2R,3R,4R,5S)-1-[(heyloxy)methyl]-2,3-dihydroxy-6,8-dioxabicyclo[3.2.1]oct-4-yl}acetamide,
[0616] N-[(1S,2R,3R,4R,5S)-2,3-dihydroxy-1-(2,5,8,11,14-pentaoxapentadec-1-yl)-6,8-dioxabicyclo[3.2.1]oct-4-yl]acetamide,
[0617] N-((1S,2R,3R,4R,5S)-2,3-dihydroxy-1-(hydroxymethyl)-6,8-dioxabicyclo[3.2.1]octan-4-yl)-2,2,2-trifluoroacetamide, compound,
[0618] N-[(1S,2R,3R,4R,5S)-2,3-dihydroxy-1-(hydroxymethyl)-6,8-dioxabicyclo[3.2.1]oct-4-yl]-2,22-trifluoroacetamide,
[0619] N-[(1S,2R,3R,4R,5S)-2,3-dihydroxy-1-(hydroxymethyl)-6,8-dioxabicyclo[3.2.1]oct-4-yl]propanamide,
[0620] N-[(1S,2R,3R,4R,5S)-2,3-dihydroxy-1-(hydroxymethyl)-6,8-dioxabicyclo[3.2.1]oct-4-yl]methanesulfonamide,
[0621] N-[(1S,2R,3R,4R,5S)-2,3-dihydroxy-1-(hydroxymethyl)-6,8-dioxabicyclo[3.2.1]oct-4-yl]-22-difluoroacetamide,
[0622] N-[(1S,2R,3R,4R,5S)-2,3-dihydroxy-1-(hydroxymethyl)-6,8-dioxabicyclo[3.2.1]oct-4-yl]-3,3,3-trifluoropropanamide,
[0623] N-[(1S,2R,3R,4R,5S)-2,3-dihydroxy-1-(hydroxymethyl)-6,8-dioxabicyclo[3.2.1]oct-4-yl]-N-methylacetamide,
[0624] N-[(1S,2R,3R,4R,5S)-2,3-dihydroxy-1-(hydroxymethyl)-6,8-dioxabicyclo[3.2.1]oct-4-yl]-N-methylmethanesulfonamide,
[0625] tert-butyl [(1S,2R,3R,4R,5S)-2,3-dihydroxy-1-(hydroxy methyl)-6,8-dioxabicyclo[3.2.1]oct-4-yl]methylcarbamate,
[0626] (1S,2R,3R,4R 5S)-1-(hydroxy methyl)-4-(methylamino)-6,8-dioxabicyclo[3.2.1]octane-2,3-diol hydrochloride,
[0627] N-[(l S,2R,3R,4R,5S)-2,3-dihydroxy-1-(15-phenyl-2,5,8,11,14-pentaoxapentadec-1-yl)-6,8-dioxabicyclo[3.2.1]oct-4-yl]acetamide,
[0628] N-[(1S,2R,3R,4R,5S)-1-(13-azido-2,5,8,11-tetraoxatridec-1-yl)-2,3-dihydroxy-6,8-dioxabicyclo[3.2.1](oct-4-yl]acetamide,
[0629] N-[(1S,2R,3R,4R,5S)-2,3-dihydroxy-1-(2,5,8,11-tetraoxatetradec-13-en-1-yl)-6,8-dioxabicyclo[3.2.1]oct-4-yl]acetamide,
[0630] N-[(1S,2R,3R,4R,5S)-2,3-dihydroxy-1-(2,5,8,11-tetraoxatetradec-13-yn-1-yl)-6,8-dioxabicyclo[3.2.1]oct-4-yl]acetamide,
[0631] N-[(1S,2R,3R,4R,5S)-1-(13-amino-2,5,8,11-tetraoxatridec-1-yl)-2,3-dihydroxy-6,8-dioxabicyclo[3.2.1]oct-4-yl]acetamide,
[0632] N-[(1S,2R,3R,4R,5S)-2,3-dihydroxy-1-(13-hydroxy-2,5,8,11 tetraoxatridec-1-yl)-6,8-dioxabicyclo[3.2.1]oct-4-yl]acetamide,
[0633] 1-[(1S,2R,3R,4R,5S)-4-(acetylamino)-2,3-dihydroxy-6,8-dioxabicyclo[3.2.1]oct-1-yl]-2,5,8,11-tetraoxatridecan-13-oic acid,
[0634] S-{1-[(1S,2R,3R,4R,5S)-4-(acetylamino)-2,3-dihydroxy-6,8-dioxabicyclo[3.2.1]oct-1-yl]-2,5,8,11-tetraoxatridecan-13-yl}ethanethioate,
[0635] N-{(1S,2R,3R,4R,5S)-2,3-dihydroxy-1-[13-(pyridin-2-yldisulfanyl)-2,5,8,11-tetraoxatridec-1-yl]-6,8-dioxabicyclo[3.2.1]oct-4-yl}acetamide,
[0636] N-(1,3-bis[(1-{1-[(1R,2R,3R,4R,5S)-4-(acetylamino)-2,3-dihydroxy-6,8-dioxabicyclo[3.2.1]oct-1-yl]-2,5,8,11-tetraoxatridecan-13-yl}-1H-1,2,3-triazol-4-yl)methoxy]-2-{[(1-{1-[(1S,2R,3R,4R,5S)-4-(acetylamino)-2,3-dihydroxy-6,8-dioxabicyclo[3.2.1]oct-1-yl]-2,5,8,11-tetraoxatridecan-13-yl}-1H-1,2,3-triazol-4-yl)methoxy]methyl}propan-2-yl)-6-(pyridin-2-yldisulfanyl)hexanamide
[0637] N-[(1S,2R,3R,4R,5S)-1-(13-{4-[(3-[(1-{1-[(1S,2R,3R,4R,5S)-4-(acetylamino)-2,3-dihydroxy-6,8-dioxabicyclo[3.2.1]oct-1-yl]-2,5,8,11-tetraoxatridecan-13-yl}-1H-1,2,3-triazol-4-yl)methoxy]-2-{[(1-{1-[(1S,2R,3R,4R,5S)-4-(acetylamino)-2,3-dihydroxy-6,8-dioxabicyclo[3.2.1]oct-1-yl]-2,5,8,11-tetraoxatridecan-13-yl}-1H-1,2,3-triazol-4-yl)methoxy]methyl}-2-aminopropoxy)methyl]-1H-1,2,3-triazol-1-yl}-2,5,8,11-tetraoxatridec-1-yl)-2,3-dihydroxy-6,8-dioxabicyclo[3.2.1]oct-4-yl]acetamide hydrochloric acid salt,
[0638] 6-azido-N-(1,3-bis[(1-{1-[(1S,2R,3R,4R,5S)-4-(acetylamino)-2,3-dihydroxy-6,8-dioxabicyclo[3.2.1]oct-1-yl]-2,5,8,11-tetraoxatridecan-13-yl}-1H-1,2,3-triazol-4-yl)methoxy]-2-{[(1-{1-[(1S,2R,3R,4R,5S)-4-(acetylamino)-2,3-dihydroxy-6,8-dioxabicyclo[3.2.1]oct-1-yl]-2,5,8,11-tetraoxatridecan-13-yl}-1H-1,2,3-triazol-4-yl)methoxy]methyl}propan-2-yl)hexanamide,
[0639] N-(1,3-bis[(1-{1-[(1S,2R,3R,4R,5S)-4-(acetylamino)-2,3-dihydroxy-6,8-dioxabicyclo[3.2.1]oct-1-yl]-2,5,8,11-tetraoxatridecan-13-yl}-1H-1,2,3-triazol-4-yl)methoxy]-2-{[(1-[(1S,2R,3R,4R,5S)-4-(acetylamino)-2,3-dihydroxy-6,8-dioxabicyclo[3.2.1]oct-1-yl]-2,5,8,11-tetraoxatridecan-13-yl}-1H-1,2,3-triazol-4-yl)methoxy]methy 1) propan-2-yl)hept-6-enamide,
[0640] N-(1,3-bis[(1-{1-[(1S,2R,3R,4R,5S)-4-(acetylamino)-2,3-dihydroxy-6,8-dioxabicyclo[3.2.1]oct-1-yl]-2,5,8,11-tetraoxatridecan-13-yl}-1H-1,2,3-triazol-4-yl)methoxy]-2-{[(1-{1-[(1S,2R,3R,4R,5S)-4-(acetylamino)-2,3-dihydroxy-6,8-dioxabicyclo[3.2.1]oct-1-yl]-2,5,8,11-tetraoxatridecan-13-yl}-1H-1,2,3-triazol-4-yl)methoxy]methyl}propan-2-yl)hept-6-ynamide,
[0641] 7-[(1,3-bis[(1-{1-[(1S,2R,3R,4R,5S)-4-(acetylamino)-2,3-dihydroxy-6,8-dioxabicyclo[3.2.1]oct-1-yl]-2,5,8,11-tetraoxatridecan-13-yl}-1H-1,2,3-triazol-4-yl)methoxy]-2-{[(1-{1-[(I S,2R,3R,4R,5S)-4-(acetylamino)-2,3-dihydroxy-6,8-dioxabicyclo[3.2.1]oct-1-yl]-2,5,8,11-tetraoxatridecan-13-yl}-1H-1,2,3-triazol-4-yl)methoxy]methyl}propan-2-yl)amino]-7-oxoheptanoic acid (Sodium salt),
[0642] benzyl {6-[(1,3-bis[(1-{1-[(1S,2R,3R,4R,5S)-4-(acetylamino)-2,3-dihydroxy-6,8-dioxabicyclo[3.2.1]oct-1-yl]-2,5,8,11-tetraoxatridecan-13-yl}-1H-1,2,3-triazol-4-yl)methoxy]-2-{[(1-{1-[(1S,2R,3R,4R,5S)-4-(acetylamino)-2,3-dihydroxy-6,8-dioxabicyclo[3.2.1]oct-1-yl]-2,5,8,11-tetraoxatridecan-13-yl}-1H-1,2,3-triazol-4-yl)methoxy]methyl}propan-2-yl)amino]-6-oxohexyl}carbamate,
[0643] 6-amino-N-(1,3-bis[(1-{1-[(1S,2R,3R,4R,5S)-4-(acetylamino)-2,3-dihydroxy-6,8-dioxabicyclo[3.2.1]oct-1-yl]-2,5,8,11-tetraoxatridecan-13-yl}-1H-1,2,3-triazol-4-yl)methoxy]-2-{[(1-{1-[(1S,2R,3R,4R,5S)-4-(acetylamino)-2,3-dihydroxy-6,8-dioxabicyclo[3.2.1]oct-1-yl]-2,5,8,11-tetraoxatridecan-13-yl}-1H-1,2,3-triazol-4-yl)methoxy]methyl}propan-2-yl)hexanamide acetate salt,
[0644] N-{6-[(1,3-bis[(1-{1-[(1 S,2R,3R,4R,5S)-4-(acetylamino)-2,3-dihydroxy-6,8-dioxabicyclo[3.2.1]oct-1-yl.]-2,5,8,11-tetraoxatridecan-13-yl}-1H-1,2,3-triazol-4-yl)methoxy]-2-{[(1-{1-[(1S,2R,3R,4R,5S)-4-(acetylamino)-2,3-dihydroxy-6,8-dioxabicyclo[3.2.1]oct-1-yl]-2,5,8,11-tetraoxatridecan-13-yl}-1H-1,2,3-triazol-4-yl)methoxy]methyl}propan-2-yl)amino]-6-oxohexyl}-6-(2,5-dioxo-2,5-dihydro-1H-pyrrol-1-yl)hexanamide,
[0645] N-{6-((1,3-bis[(1-{1-[(1S2R,3R,4R,5S)-4-(acetylamino)-2,3-dihydroxy-6,8-dioxabicyclo[3.2.1]oct-1-yl]-2,5,8,11-tetraoxatridecan-13-yl}-1H-1,2,3-triazol-4-yl)methoxy]-2-{[(1-{1-[(1S,2R,3R,4R,5S)-4-(acetylamino)-2,3-dihydroxy-6,8-dioxabicyclo[3.2.1]oct-1-yl]-2,5,8,11-tetraoxatridecan-13-yl}-1H-1,2,3-triazol-4-yl)methoxy]methyl}propan-2-yl)amino)-6-oxohexyl}-6-[(bromoacetyl)amino]hexanamide,
[0646] 4-{[(2R)-5-(carbamoylamino)-2-{[(2R)-2-cyclopentyl-2-{[6-(2,5-dioxo-2,5-dihydro-1H-pyrrol-1-yl)hexanoyl]amino}acetyl]amino}pentanoyl]amino}benzyl {6-[(1,3-bis[(1-{1-[(1S,2R,3R,4R,5S)-4-(acetylamino)-2,3-dihydroxy-6,8-dioxabicyclo[3.2.1]oct-1-yl]-2,5,8,11-tetraoxatridecan-13-yl}-1H-1,2,3-triazol-4-yl)methoxy]-2-{[(1-{1-[(1S,2R,3R,4R,5S)-4-(acetylamino)-2,3-dihydroxy-6,8-dioxabicyclo[3.2.1]oct-1-yl]-2,5,8,11-tetraoxatridecan-13-yl}-1H-1,2,3-triazol-4-yl)methoxy]methyl}propan-2-yl)amino]-6-oxohexyl}carbamate,
[0647] N-(1,3-bis[(1-{1-[(1S,2R,3R,4R,5S)-4-(acetylamino)-2,3-dihydroxy-6,8-dioxabicyclo[3.2.1]oct-1-yl]-2,5,8,11-tetraoxatridecan-13-yl}-1H-1,2,3-triazol-4-yl)methoxy]-2-{[(1-{1-[(1S,2R,3R,4R,5S)-4-(acetylamino)-2,3-dihydroxy-6,8-dioxabicyclo[3.2.1)oct-1-yl]-2,5,8,11-tetraoxatridecan-13-yl}-1H-1,2,3-triazol-4-yl)methoxy]methyl}propan-2-yl)-3,19-dioxo-1-(pyridin-2-yldisulfanyl)-7,10,13,16-tetraoxa-4,20-diazahexacosan-26-amide,
[0648] N-(1,3-bis[(1-{1-[(1S2R,3R,4R,5S)-4-(acetylamino)-2,3-dihydroxy-6,8-dioxabicyclo[3.2.1]oct-1-yl]-2,5,8,11-tetraoxatridecan-13-yl}-1H-1,2,3-triazol-4-yl)methoxy]-2-{[(1-{1-[(1S,2R,3R,4R,5S)-4-(acetylamino)-2,3-dihydroxy-6,8-dioxabicyclo[3.2.1]oct-1-yl]-2,5,8,11-tetraoxatridecan-13-yl}-1H-1,2,3-triazol-4-yl)methoxy]methyl}propan-2-yl)-3,31-dioxo-1-(pyridin-2 yldisulfanyl)-7,10,13,16,19,22,25,28-octaoxa-4,32-diazaoctatriacontan-38-amide,
[0649] N-{6-((1,3-bis[(1-{1-[(1S,2R,3R,4R,5S)-4-(acetylamino) 2,3-dihydroxy-6,8-dioxabicyclo[3.2.1]oct-1-yl]-2,5,8,11-tetraoxatridecan-13-yl}-1H-1,2,3-triazol-4-yl)methoxy]-2-{[(1-{1-[(1S,2R,3R,4R,5S)-4-(acetylamino)-2,3-dihydroxy-6,8-dioxabicyclo[3.2.1)oct-1-yl]-2,5,8,11-tetraoxatridecan-13-yl}-1H-1,2,3-triazol-4-yl)methoxy]methyl}propan-2-yl)amino]-6-oxohexyl}-6-(pyridin-2-yldisulfanyl)hexanamide,
[0650] 2-(pyridin-2-yldisulfanyl)ethyl {6-[(1,3-bis[(1-{1-[(1S,2R,3R,4R,5S)-4-(acetylamino)-2,3-dihydroxy-6,8-dioxabicyclo[3.2.1]oct-1-yl]-2,5,8,11-tetraoxatridecan-13-yl}-1H-1,2,3-triazol-4-yl)methoxy]-2-{[(1-{1-[(1S,2R,3R,4R,5S)-4-(acetylamino)-2,3-dihydroxy-6,8-dioxabicyclo[3.2.1]oct-1-yl]-2,5,8,11-tetraoxatridecan-13-yl}-1H-1,2,3-triazol-4-yl)methoxy]methyl}propan-2-yl)amino]-6-oxohexyl}carbamate,
[0651] N-{6-[(1,3-bis[(1-{1-[(1S,2R,3R,4R,5S)-4-(acetylamino)2,3-dihydroxy-6,8-dioxabicyclo[3.2.1]oct-1-yl]-2,5,8,11-tetraoxatridecan-13-yl}-1H-1,2,3-triazol-4-yl)methoxy]-2-{[(1-{1-[(1S,2R,3R,4R,5S)-4-(acetylamino)-2,3-dihydroxy-6,8-dioxabicyclo[3.2.1]oct-1-yl]-2,5,8,11-tetraoxatridecan-13-yl}-1H-1,2,3-triazol-4-yl)methoxy]methyl}propan-2-yl)amino]-6-oxohexyl}-6-(4,4,5,5-tetramethyl-1,32-dioxaborolan-2-yl)hexanamide,
[0652] N-{6-((1,3-bis[(1-{1-[(1S2R,3R,4R,5S)-4-(acetylamino)-2,3-dihydroxy-6,8-dioxabicyclo[3.2.1]oct-1-yl]-2,5,8,11-tetraoxatridecan-13-yl}-1H-1,2,3-triazol-4-yl)methoxy]-2-{[(1-{1-[(1S,2R,3R,4R,5S)-4-(acetylamino)-2,3-dihydroxy-6,8-dioxabicyclo[3.2.1]oct-1-yl]-2,5,8,11-tetraoxatridecan-13-yl}-1H-1,2,3-triazol-4-yl)methoxy]methyl}propan-2-yl)amino)-6-oxohexyl}-N′-(1,3-dihydroxypropan-2-yl)heptanediamide,
[0653] 6-azido-N-{6-[(1,3-bis[(1-{1-[(1S,2R,3R,4R,5S)-4-(acetylamino)-2,3-dihydroxy-6,8-dioxabicyclo[3.2.1]oct-1-yl]-2,5,8,11-tetraoxatridecan-13-yl}-1H-1,2,3-triazol-4-yl)methoxy]-2-{[(1-{1-[(1S,2R,3R,4R,5S)-4-(acetylamino)-2,3-dihydroxy-6,8-dioxabicyclo[3.2.1]oct-1-yl]-2,5,8,11-tetraoxatridecan-13-yl}-1H-1,2,3-triazol-4-yl)methoxy]methyl}propan-2-yl)amino]-6-oxohexyl}hexanamide,
[0654] 6-(benzyloxy)-N-{6-[(1,3-bis[(1-{1-[(1S,2R,3R,4R,5S)-4-(acetylamino) 2,3-dihydroxy-6,8-dioxabicyclo[3.2.1]oct-1-yl]-2,5,8,11-tetraoxatridecan-13-yl}-1H-1,2,3-triazol-4-yl)methoxy]-2-{[(1-{1 [(1S,2R,3R,4R,5S)-4-(acetylamino)-2,3-dihydroxy-6,8-dioxabicyclo[3.2.1]oct-1-yl]-2,5,8,11-tetraoxatridecan-13-yl}-1H-1,2,3-triazol-4-yl)methoxy]methyl}propan-2-yl)amino]-6-oxohexyl}hexanamide,
[0655] (1S,2R,3R,4R,5S)-4-(acetylamino)-1-{13-[4-({3-[(1-{1-[(1S,2R,3R,4R,5S)-4-(acetylamino)-2,3-bis(acetyloxy)-6,8-dioxabicyclo[3.2.1]oct-1-yl]-2,5,8,11-tetraoxatridecan-13-yl}-1H-1,2,3-triazol-4-yl)methoxy]-2-{[(1-{1-[(1S,2R,3R,4R,5S)-4-(acetylamino)-2,3-bis(acetyloxy)-6,8-dioxabicyclo[3.2.1]oct-1-yl]-2,5,8,11-tetraoxatridecan-13-yl}-1H-1,2,3-triazol-4-yl)methoxy]methyl}-2-({6[(6hydroxyhexanoyl)amino]hexanoyl}amino)propoxy}methyl)-1H-1,2,3-triazol-1-yl]-2,5,8,11-tetraoxatridec-1-yl}-3-(acetyloxy)-6,8-dioxabicyclo[3.2.1]oct-2-yl acetate,
[0656] benzyl [6-({6-[(1,3-bis[(1-{1-[(1 S2R,3R,4R,5S)-4-(acetylamino)-2,3-dihydroxy-6,8-dioxabicyclo[3.2.1]oct-1-yl]-2,5,8,11-tetraoxatridecan-13-yl}-1H-1,2,3-triazol-4-yl)methoxy]-2-{[(1-{1-[(1S,2R,3R,4R,5S)-4-(acetylamino)-2,3-dihydroxy-6,8-dioxabicyclo[3.2.1]oct-1-yl]-2,5,8,11-tetraoxatridecan-13-yl}-1H-1,2,3-triazol-4-yl)methoxy]methyl}propan-2-yl)amino]-6-oxohexyl}amino)-6-oxohexyl]carbamate,
[0657] 6-amino-N-{6-[(1,3-bis[(1-{1-[(1S,2R,3R,4R,5S)-4-(acetylamino)-2,3-dihydroxy-6,8-dioxabicyclo[3.2.1]oct-1-yl]-2,5,8,11-tetraoxatridecan-13-yl}-1H-1,2,3-triazol-4-yl)methoxy]-2-{[(1-{1 [(1S,2R,3R,4R,5S)-4-(acetylamino)-2,3-dihydroxy-6,8-dioxabicyclo[3.2.1]oct-1-yl]-2,5,8,11-tetraoxatridecan-13-yl}-1H-1,2,3-triazol-4-yl)methoxy]methyl}propan-2-yl)amino]-6-oxohexyl}hexanamide acetate,
[0658] 4-(benzyloxy)-N-(1,3-bis[(1-{1-[(1S,2R,3R,4R,5S)-4-amino-2,3-dihydroxy-6,8-dioxabicyclo[3.2.1]oct-1-yl]-2,5,8,11-tetraoxatridecan-13-yl}-1H-1,2,3-triazol-4-yl)methoxy]-2-{[(1-{1-[(1S,2R,3R,4R,5S)-4-amino-2,3-dihydroxy-6,8-dioxabicyclo[3.2.1]oct-1-yl]-2,5,8,11-tetraoxatridecan-13-yl}-1H-1, 2, 3-triazol
[0659] 4-yl)methoxy]methyl}propan-2-yl)butanamide,
[0660] N-(1,3-bis[(1-{1-[(1S,2R,3R,4R,5S)-4-(acetylamino)-2,3-dihydroxy-6,8-dioxabicyclo[3.2.1]oct-1-yl]-2,5,8,11-tetraoxatridecan-13-yl}-1H-1,2,3-triazol-4-yl)methoxy]-2-{[(1-{1-[(1S,2R,3R,4R,5S)-4-(acetylamino)-2,3-dihydroxy-6,8-dioxabicyclo[3.2.1]oct-1-yl]-2,5,8,11-tetraoxatridecan-13-yl}-1H-1,2,3-triazol-4-yl)methoxy]methyl}propan-2-yl)-4-hydroxybutanamide, and
[0661] N-(2-{[6-({6-[(1,3-bis[(1-{1-[(1S,2R,3R,4R,5S)-4-(acetylamino)-2,3-dihydroxy-6,8-dioxabicyclo[3.2.1]oct-1-yl]-2,5,8,11-tetraoxatridecan-13-yl}-1H-1,2,3-triazol-4-yl)methoxy]-2-{[(1-{1-[(1S,2R,3R,4R,5S)-4-(acetylamino)-2,3-dihydroxy-6,8-dioxabicyclo[3.2.1]oct-1-yl]-2,5,8,11-tetraoxatridecan-13-yl}-1H-1,2,3-triazol-4-yl)methoxy]methyl}propan-2-yl)amino]-6-oxohexyl}amino)-6-oxohexyl]oxy}-1,3-dioxan-5-yl)-6-(pyridin-2-yldisulfanyl)hexanamide

[0662] In some embodiments, a PNPLA3 oligonucleotide comprises an additional component of Formula (N)

[chemical structure]

[0663] In some embodiments, a PNPLA3 oligonucleotide comprises an additional component selected from:

[chemical structure]

[0664] In some embodiments, a PNPLA3 oligonucleotide comprises an additional component selected from any of the following formulae:

[chemical structure]

[chemical structure]

[chemical structure]

[chemical structure]

[chemical structure]

[0665] In some embodiments, the present disclosure pertains to: a compound having the Formula O1:

Y¹-L¹-(Z¹⁰)_{za}, O1
[0666] or a pharmaceutically acceptable salt of said compound wherein″ is an oligonucleotide targeting PNPLA3;
[0667] za is 1, 2, or 3 and
[0668] L¹ is a compound of Formula L11, L12, L13, L43, L44, L45, L46, L47, L48, L49, L50, L51, L52, L53 or L54 wherein the connection sites with Y¹ and Z¹⁰ are indicated:

[chemical structure]

[chemical structure]

[chemical structure]

[0669] wherein each T¹ is independently absent or is alkylene, alkenylene, or alkynylene, wherein one or more —CH₂— groups of the alkylene, alkenylene, or alkynylene may each independently be replaced with a heteroatom group independently selected from —O—, —S—, and —N(R⁴⁹)— wherein the heteroatom groups are separated by at least 2 carbon atoms;
[0670] each Q¹ is independently absent or is —C(O)—, —C(O) NR⁴⁸—, —NR⁴⁹—C(O)—. —O—C(O)—NR⁴⁹—. —NR⁴⁹—C(O)—O—, —CH₂—, —NR⁴⁹C(O)NR⁴⁹—, a bivalent heteroaryl group, or a heteroatom group selected from —O—, —S—, —S—S—, —S(O)—, —S(O)₂—, and —NR⁴⁹—, wherein at least two carbon atoms separate the heteroatom groups O—, —S—, —S—S—, —S(O)—, —S(O)₂— and —NR⁴⁹— from any other heteroatom group, or a structure of the formula:

[chemical structure]

[0671] wherein R⁵³ is —O or —NH—, and R⁵⁴ is —O or —S;
[0672] each R⁴⁹ is independently —H, —(C₁-C₂₀)alkyl, or —(C₃-C₆)cycloalkyl wherein one to six —CH₂-groups of the alkyl or cycloalkyl separated by at least two carbon atoms may be replaced with —O—, —S—, or —N(R^{49a})—, and —CH₃ of the alkyl may be replaced with a heteroatom group selected from —N(R^{49a})₂, —OR^{49′} and —S(R^{49a}) wherein the heteroatom groups are separated by at least 2 carbon atoms; and wherein the alkyl and cycloalkyl may be substituted with halo atoms and wherein each R⁴⁹² is independently —H, —(C₁-C₆)alkyl, or —(C₃-C₆)cycloalkyl;
[0673] R⁵³ is —O or —NH;
[0674] R⁵⁴ is —O or —S;
[0675] each n is independently 0, 1, 2, 3, 4, 5, 6, 7, 8, 9, 10, 11, 12, 13, 14, 15, 16, 17, 18, 19, 20, 21, 22, 23, 24, 25, 26, 27, 28, 29, 30, 31, 32, 33, 34, 35, 36, 37, 38, 39, or 40; wherein if n is greater than 0, each T¹ and each Q¹ of each (T¹-Q¹-T¹-Q¹) is independently selected; and
[0676] each Z¹⁰ is independently a compound of Formula Z12, Z13, Z14, Z15, Z16, Z17, Z18, Z19, Z20, or Z21, or a geometrical or position isomer thereof, wherein the connection site with L¹ is indicated:

[chemical structure]

[0677] wherein each R⁴⁶ is independently —CN, —CH₂—CN, —C≡CH, —CH₂—N₃, —CH₂—NH₂, —CH₂—N(R⁵²)—S(O)₂—R⁵¹, —CH₂—CO₂H, —CO₂H, —CH₂—OH, —CH₂—SH, —CH═CH—R⁵¹, —CH₂—R⁵¹, —CH₂—S—R⁵¹, —CH₂—N(R⁵²)—R⁵¹, —CH₂—N(R⁵²)—C(O)—R⁵¹, —CH₂—N(R⁵²)—C(O)—O—R⁵¹, —CH₂—N(R⁵)—C(O)—N(R⁵²)—R⁵¹, —CH₂—O—R⁵¹, —CH₂—O—C(O)—R⁵¹, —CH₂—O—C(O)—N(R⁵²)—R⁵¹, —CH₂—O—C(O)—O—R⁵¹, —CH₂—S(O)—R⁵¹, —CH₂—S(O)₂—R⁵¹, —CH₂—S(O)₂—N(R⁵²)—R⁵¹, —C(O)—NH₂, —C(O)—O—R⁵¹, —C(O)—N(R⁵²)—R⁵¹, or aryl or heteroaryl, wherein the aryl or heteroaryl is optionally substituted with R⁵¹
[0678] each R⁴⁷ is independently —OH, —N₃, —N(R⁴)₂, —N(R⁴¹)—C(O)—R⁴⁸, —N(R⁴⁸)—C(O)—N(R⁴⁸)₂, —N(R⁴⁸)—C(O)—OR⁴⁸, —N(R⁴⁸)—S(O)₂—R⁴⁵, tetrazole, or triazole, wherein the tetrazole and triazole are optionally substituted with R⁴⁸;
[0679] each R⁴⁵ is independently —H, —(C₁-C₅)alkyl, halo-substituted (C₁-C₅)alkyl, halo substituted —(C₃-C₆)cycloalkyl, —(C₁-C₅)alkenyl, —(C₁-C₅)alkynyl, halo substituted —(C₁-C₅)alkenyl, halo substituted —(C₁-C₅)alkynyl, or —(C₃-C₆)cycloalkyl, wherein a —CH₂— group of the alkyl or cycloalkyl may each be independently replaced with a heteroatom group selected from —O—, —S—, and —N(R⁵²)— and —CH₃ of the alkyl may each be independently replaced with a heteroatom group selected from —N(R⁵²)₂, —OR⁵², and —S(R⁵²) wherein the heteroatom groups are separated by at least 2 carbon atoms;
[0680] each R⁵¹ is independently —H, —(C₃-C₂₀)cycloalkyl, —(C₁-C₆₀)alkenyl, —(C₁-C₆₀)alkynyl, or —(C₁-C₆₀)alkyl wherein one to six —CH₂— groups of the cycloalkyl or one to 20 —CH₂— groups of the alkyl may each be independently replaced with heteroatoms independently selected from —O—, —S—, and —N(R⁴⁹)— wherein the heteroatoms are separated by at least two carbon atoms, and —CH₃ of the alkyl may each be independently replaced with a heteroatom group selected from —N(R⁴⁹)₂, —OR⁴⁹, and —S(R⁴⁹) wherein the heteroatom groups are separated by at least 2 carbon atoms, and wherein the alkyl, alkenyl, alkynyl, and cycloalkyl may be substituted with halo atoms; and
[0681] each R⁵² is independently —H, —(C₁-C₂₀)alkyl, —(C₁-C₂₀)alkenyl, —(C₁-C₂₀)alkynyl, or —(C₃-C₆)cycloalkyl wherein one to six —CH₂— groups of the alkyl or cycloalkyl separated by at least two carbon atoms may each be independently replaced with a heteroatom independently selected from —O—, —S—, or —N(R⁴⁹)—, and —CH₃ of the alkyl may each be independently replaced with a heteroatom group selected from —N(R⁴⁹)₂, —OR⁴⁹, and —S(R⁴⁹) wherein the heteroatom groups are separated by at least 2 carbon atoms; and wherein the alkyl, alkenyl, alkynyl, and cycloalkyl may be substituted with halo atoms.

[0682] In some embodiments, Y¹ comprises at least 15 bases.

[0683] In some embodiments, the base sequence of Y¹ comprises or is the base sequence of any. PNPLA3 oligonucleotide listed in Table 1A, or the base sequence of Y¹ comprises 15 contiguous bases of the sequence of any PNPLA3 oligonucleotide listed in Table 1 A.

[0684] In some embodiments, Y¹ comprises at least 1 phosphodiester internucleotidic linkage.

[0685] In some embodiments, Y¹ comprises at least 1 chirally controlled modified internucleotidic linkage.

[0686] In some embodiments, Y¹ comprises at least 1 chirally con trolled modified internucleotidic linkage which is a chirally controlled phosphorothioate.

[0687] In some embodiments, Y¹ comprises at least 1 chirally controlled modified internucleotidic linkage which is a chirally controlled phosphorothioate in the Sp configuration.

[0688] In some embodiments, Y¹ comprises at least 1 chirally controlled modified internucleotidic linkage which is a chirally controlled phosphorothioate in the Rp configuration.

[0689] In some embodiments, Y¹, wherein the chirally controlled modified internucleotidic linkage or chirally controlled phosphorothioate comprises a phosphorus chiral center which has a diastereopurity of at least 70% within the composition.

[0690] In some embodiments, Y¹, wherein the chirally controlled modified internucleotidic linkage or chirally controlled phosphorothioate comprises a phosphorus chiral center which has a diastereopurity of at least 70%, 75%, 80%, 85%), 90%, 91%, 92%, 93%, 94%, 95%, 96%, 97%, 98%, 99% or 99.5%.

[0691] In some embodiments, Y¹ comprises at least 1 sugar modification.

[0692] In some embodiments, Y¹ comprises at least 1 base modification.

[0693] In some embodiments, Y¹ further comprises a pattern of backbone linkages.

[0694] In some embodiments, Y¹ further comprises a pattern of backbone chiral centers.

[0695] In some embodiments, Y¹ further comprises a pattern of chemical modifications.

[0696] In some embodiments, Y¹ further comprises a pattern of back bone linkages, a pattern of backbone chiral centers, and a pattern of chemical modifications.

[0697] In some embodiments, the pattern of backbone linkages, the pattern of backbone chiral centers, and the pattern of chemical modifications of the oligonucleotide are the pattern of backbone linkages, the pattern of backbone chiral centers, and/or the pattern of chemical modifications of the oligonucleotide of any oligonucleotide listed in Table 1 A.

[0698] In some embodiments, the pattern of backbone linkages, the pattern of backbone chiral centers, and the pattern of chemical modifications of the oligonucleotide are the pattern of backbone linkages, the pattern of backbone chiral centers, and/or the pattern of chemical modifications of the oligonucleotide of an oligonucleotide listed in Table 1 A the base sequence of Y¹ comprises or is the base sequence of any PNPLA3 oligonucleotide listed in Table 1A, or the base sequence of Y¹ comprises 15 contiguous bases of the sequence of any PNPLA3 oligonucleotide listed in Table 1 A.

[0699] In some embodiments, the oligonucleotide is capable of mediating a decrease in the expression, level and/or activity of a PNPLA3 target gene or a gene product thereof.

[0700] In some embodiments, the oligonucleotide is capable of mediating a decrease in the expression, level and/or activity of a PNPLA3 target gene or a gene product thereof via a mechanism mediated by RNaseH, steric hindrance and/or RNA interference.

[0701] In some embodiments:
[0702] each T¹ is independently absent or is alkylene, wherein one or more —CH₂— groups of the alkylene, may each independently be replaced with a heteroatom group independently selected from —O—, and —N(R⁴⁹)— wherein the heteroatom groups are separated by at least 2 carbon atoms;
[0703] each Q¹ is independently absent or is —C(O), —C(O)—NR⁴⁹. —NR⁴⁹—C(O), or a heteroatom group selected from —O—, and —NR⁴⁹, wherein at least two carbon atoms separate the heteroatom groups —O— and —NR⁴⁹ from any other heteroatom group;
[0704] each R⁴⁹ is independently —H, —(C₁-C₆)alkyl, or —(C₃-C₆)cycoalkyl wherein the alkyl and cycloalkyl may be substituted with halo atoms;
[0705] each n is independently 0, 1, 2, 3 or 4; wherein if n is greater than 0, each T¹ and each Q¹ of each (T¹-Q¹-T¹-Q¹) is independently selected;
[0706] each R⁴⁶ is —CH₂—OH;
[0707] each R⁴⁷ is —N(R⁴⁸)—C(O)—R⁴⁸; and
[0708] each R⁴⁸ is independently —H, or —(C₁-C₅)alkyl.

[0709] In some embodiments, the present disclosure pertains to: a compound having the Formula O2:

Y¹-L²-(Z¹¹)_{za} 02
[0710] or a pharmaceutically acceptable salt thereof wherein Y¹ is an oligonucleotide targets
[0711] PNPLA3;
[0712] za is 1, 2, or 3;
[0713] L² is a linking group; and
[0714] Z¹¹ is a compound of Formula (B), wherein connection site with L² is indicated:

[chemical structure]

[0715] each R⁴⁷ is independently —OH, —N₃, —N(R⁴⁸)₂, —N(R⁴⁸)—C(O)—R⁴⁸)₂, —N(R⁴⁸)—C(O)—N(R⁴⁸)₂, —N(R⁴⁸)—C(O)—OR⁴⁸, —N(R⁴⁸)—S(O)₂—R⁴⁸, tetrazole, or triazole, wherein the tetrazole and triazole are optionally substituted with R⁴⁸;
[0716] each R⁴⁸ is independently —H, —(C₁-C₅)alkyl, halo-substituted —(C₁-C₅)alkyl, halo substituted —(C₃-C₆)cycloalkyl, —(C₁-C₅)alkenyl, —(C₁-C₅)alkynyl, halo substituted —(C₁-C₅)alkenyl, halo substituted —(C₁-C₅)alkynyl, or —(C₃-C₆)cycloalkyl, wherein a —CH₂— group of the alkyl or cycloalkyl may each be independently replaced with a heteroatom group selected from —O—, —S—, and —N(R⁵²)— and —CH₃ of the alkyl may each be independently replaced with a heteroatom group selected from —N(R⁵²)₂, —OR⁵², and —S(R⁵²) wherein the heteroatom groups are separated by at least 2 carbon atoms;
[0717] each R⁴⁹ is independently —H, —(C₁-C₂₀)alkyl, or —(C₃-C₆)cycloalkyl wherein one to six —CH₂-groups of the alkyl or cycloalkyl separated by at least two carbon atoms may be replaced with —O—, —S—, or —N(R^{49a})—, and —CH₃ of the alkyl may be replaced with a heteroatom group selected from —N(R^{49a})₂, —OR^{49a}, and —S(R^{49a}) wherein the heteroatom groups are separated by at least 2 carbon atoms; and wherein the alkyl and cycloalkyl may be substituted with halo atoms and wherein each R⁴⁹⁸ is independently —H, —(C₁-C₆)alkyl, or —(C₃-C₆)cycloakyl;
   [0718] each R⁵² is independently —H, —(C₁-C₂₀)alkyl, —(C₁-C₂₀)alkenyl, —(C₁-C₂₀)alkynyl, or —(C₃-C₆)cycloalkyl wherein one to six —CH₂— groups of the alkyl or cycloalkyl separated by at least two carbon atoms may each be independently replaced with a heteroatom independently selected from —O—, —S—, or —N(R⁴⁹)—, and —CH₃ of the alkyl may each be independently replaced with a heteroatom group selected from —N(R⁴⁹)₂, —OR⁴⁹, and —S(R⁴⁹) wherein the heteroatom groups are separated by at least 2 carbon atoms; and wherein the alkyl, alkenyl, alkynyl, and cycloalkyl may be substituted with halo atoms.

[0719] In some embodiments, 12 is a compound of Formula L1, L2, L3, L4, L5, L6, L7, L8, L9, L10, L11, L12, L13 or L14, wherein connection sites with Y¹ and Z¹¹ are indicated:

[chemical structure]

[chemical structure]

[0720] wherein each T¹ is independently absent or is alkylene, alkenylene, or alkynylene, wherein one or more —CH₂— groups of the alkylene, alkenylene, or alkynylene may each independently be replaced with a heteroatom group independently selected from —O—. —S—, and —N(R⁴⁹)— wherein the heteroatom groups are separated by at least 2 carbon atoms;
[0721] each Q¹ is independently absent or is —C(O)—, —C(O)—NR⁴⁹—, —NR⁴⁹—C(O)—, —O—C(O)—NR⁴⁹—, —NR⁴⁹—C(O)—O—, —CH₂—, —NR⁴⁹C(O)NR⁴⁹—, a bivalent heteroaryl group, or a heteroatom group selected from —O—, S—, —S—S—, —S(O)—, —S(O)₂—, and —NR⁴⁹—, wherein at least two carbon atoms separate the heteroatom groups O—, —S—, —S—S—, —S(O)—, —S(O)₂— and -NR⁴⁹— from any other heteroatom group, or a structure a of the formula:

[chemical structure]

[0722] wherein R⁵³ is —O or —NH, and R⁵⁴ is —O or —S;
[0723] each R⁴⁹ is independently —H, —(C₁-C₂₀)alkyl, or —(C₃-C₆)cycloakyl wherein one to six —CH₂-groups of the alkyl or cycloalkyl separated by at least two carbon atoms may be replaced with —O—, —S—, or —N(R^{49a})—, and —CH₃ of the alkyl may be replaced with a heteroatom group selected from —N(R^{49a})₂, —OR⁴⁹a, and —S(R⁴⁹⁸) wherein the heteroatom groups are separated by at least 2 carbon atoms; and wherein the alkyl and cycloalkyl may be substituted with halo atoms; and wherein each R^{49a} is independently —H, —(C₁-C₆)alkyl, or —(C₃-C₆)cycloalkyl;
[0724] R⁵³ is —O or —NH;
[0725] R⁵⁴ is —O or —S; and
[0726] each n is independently 0, 1, 2, 3, 4, 5, 6, 7, 8, 9, 10, 11, 12, 13, 14, 15, 16, 17, 18, 19, 20, 21, 22, 23, 24, 25, 26, 27, 28, 29, 30, 31, 32, 33, 34, 35, 36, 37, 38, 39, or 40; wherein if n is greater than 0, each T¹ and each Q of each (T¹-Q¹-T¹-Q¹) is independently selected.

[0727] In some embodiments, Y¹ comprises at least 15 bases.

[0728] In some embodiments, the base sequence of Y¹ comprises or is the base sequence of any PNPLA3 oligonucleotide listed in Table 1A, or the base sequence of Y¹ comprises 15 contiguous bases of the sequence of any PNPLA3 oligonucleotide listed in Table 1A.

[0729] In some embodiments, Y¹ comprises at least 1 phosphodiester internucleotidic linkage.

[0730] In some embodiments, Y¹ comprises at least 1 chirally controlled modified internucleotidic linkage.

[0731] In some embodiments, Y¹ comprises at least 1 chirally controlled modified internucleotidic linkage which is a chirally controlled phosphorothioate.

[0732] In some embodiments¹ comprises at least 1 chirally con trolled modified internucleotidic linkage which is a chirally controlled phosphorothioate in the Sp configuration.

[0733] In some embodiments, Y¹ comprises at least 1 chirally controlled modified internucleotidic linkage which is a chirally controlled phosphorothioate in the Rp configuration.

[0734] In some embodiments, Y¹, wherein the chirally controlled modified internucleotidic linkage or chirally controlled phosphorothioate comprises a phosphorus chiral center which has a diastereopurity of at least 70% within the composition.

[0735] In some embodiments, Y¹, wherein the chirally controlled modified internucleotidic linkage or chirally controlled phosphorothioate comprises a phosphorus chiral center which has a diastereopurity of at least 70%, 75%, 80%, 85%, 90%, 91%, 92%, 93%, 94%, 95%, 96%, 97%, 98%, 99% or 99.5%.

[0736] In some embodiments, Y¹ comprises at least 1 sugar modification.

[0737] In some embodiments, Y¹ comprises at least 1 base modification.

[0738] In some embodiments, the pattern of backbone linkages of the oligonucleotide is the pattern of backbone linkages of any oligonucleotide listed in Table 1A.

[0739] In some embodiments, the pattern of backbone chiral centers of the oligonucleotide is the pattern of backbone chiral centers of any oligonucleotide listed in Table 1A.

[0740] In some embodiments, the pattern of chemical modifications of the oligonucleotide is the pattern of chemical modifications of any oligonucleotide listed in Table 1 A.

[0741] In some embodiments, the pattern of backbone linkages, the pattern of backbone chiral centers, and/or the pattern of chemical modifications of the oligonucleotide are the pattern of backbone linkages, the pattern of backbone chiral centers, and/or the pattern of chemical modifications of the oligonucleotide of any oligonucleotide listed in Table 1A.

[0742] In some embodiments, the pattern of backbone linkages, the pattern of backbone chiral centers, and the pattern of chemical modifications of the oligonucleotide are the pattern of backbone linkages, the pattern of backbone chiral centers, and/or the pattern of chemical modifications of the oligonucleotide of any oligonucleotide listed in Table 1A.

[0743] In some embodiments, the pattern of backbone linkages, the pattern of backbone chiral centers, and the pattern of chemical modifications of the oligonucleotide are the pattern of backbone linkages, the pattern of backbone chiral centers, and/or the pattern of chemical modifications of Y¹ is that of an oligonucleotide listed in Table 1 A and the base sequence of Y¹ comprises or is the base sequence of any PNPLA3 oligonucleotide listed in Table 1A or the base sequence of Y¹ comprises 15 contiguous bases of the sequence of any PNPLA3 oligonucleotide listed in Table 1 A.

[0744] In some embodiments, the oligonucleotide is capable of mediating a decrease in the expression, level and/or activity of a PNPLA3 target gene or a gene product thereof.

[0745] In some embodiments, the oligonucleotide is capable of mediating a decrease in the expression, level and/or activity of a PNPLA3 target gene or a gene product thereof via a mechanism mediated by RNaseH, steric hindrance and/or RNA interference.

[0746] In some embodiments: each R⁴⁷ is —N(R^{4′})—C(O)—R^{4′}; and each R⁴⁸ is independently —H, or —(C₁-C₅)alkyl.

[0747] In some embodiments:
[0748] each T¹ is independently absent or is alkylene, wherein
[0749] one or more —CH₂— groups of the alkylene, may each independently be replaced with a heteroatom group independently selected from —O—, and —N(R⁴⁹)— wherein the heteroatom groups are separated by at least 2 carbon atoms; each Q¹ is independently absent or is C(O), C(O)—NR⁴⁹, NR⁴⁹—C(O), or a heteroatom group
[0750] selected from O, and NR⁴⁹, wherein at least two carbon atoms separate the heteroatom groups O and NR⁴⁹ from any other heteroatom group;
[0751] each R⁴⁹ is independently —H, —(C₁-C₆)alkyl, or —(C₃-C₆)cycloalkyl wherein the alkyl and cycloalkyl may be substituted with halo atoms; each n is independently 0, 1, 2, 3 or 4; wherein if n is greater than 0, each T¹ and each Q¹ of each (T¹-Q¹-T¹-Q¹) is independently selected.

[0752] In some embodiments, the present disclosure pertains to: a comprising a compound comprising: (a) an oligonucleotide capable of targeting PNPLA3; (b) a linking group; and (c) 1, 2, or 3 moieties independently selected from Z¹⁰ and Z¹¹; wherein the linking group links the oligonucleotide and the 1, 2 or 3 moieties, and wherein:
[0753] each Z¹⁰ is independently a compound of Formula Z12, Z13, Z14, Z15, Z16, Z17, Z18, Z19, Z20, or Z21, or a geometrical or position isomer thereof, wherein the connection site with L¹ is indicated:

[chemical structure]

[0754] wherein each R⁴⁶ is independently —CN, —CH₂—CN, —C≡CH, —CH₂—N₃, —CH₂—NH₂, —CH₂—N(R⁵²)—S(O)₂—R⁵¹, —CH₂—CO₂H, —CO₂H, —CH₂—OH, —CH₂—SH, —CH═CH—R^{5′}, —CH₂—R⁵¹, —CH₂—S—R⁵¹, —CH₂—N(R⁵²)—R⁵¹, —CH₂—N(R⁵²)—C(O)—R⁵¹, —CH₂—N(R⁵²)—C(O)—O—R⁵¹, —CH₂—N(R⁵²)—C(O)—N(R⁵²)—R⁵¹, —CH₂—O—R⁵¹, —CH₂—O—C(O)—R⁵¹, —CH₂—O—C(O)—N(R⁵²)—R⁵¹, —CH₂—O—C(O)—O—R⁵¹, —CH₂—S(O)—R⁵¹, —CH₂—S(O)₂—R⁵¹, —CH₂—S(O)₂—N(R⁵²)—R⁵¹, —C(O)—NH₂. —C(O)—O—R⁵¹, —C(O)—N(R⁵²)—R⁵¹, or aryl or heteroaryl, wherein the aryl or heteroaryl is optionally substituted with R⁵¹
[0755] each R⁴⁷ is independently —OH, —N₃, —N(R*)₂, —N(R⁴⁸)—C(O)—R⁴⁸, —N(R⁴⁸)—C(O j-N(R⁴⁸)₂, —N(R⁴⁸)—C(O)—OR⁴⁸, —N(R⁴⁸)—S(O)₂—R⁴², tetrazole, or triazole, wherein the tetrazole and triazole are optionally substituted with R⁴⁸;
[0756] each R⁴⁸ is independently —H, —(C₁-C₅)alkyl, halo-substituted (C₁-C₅)alkyl, halo substituted —(C₃-C₆)cycloalkyl, —(C₁-C₅)alkenyl, —(C₁-C₅)alkynyl, halo substituted —(C₁-C₅)alkenyl, halo substituted —(C₁-C₅)alkynyl, or —(C₃-C₆)cycloalkyl, wherein a —CH₂— group of the alkyl or cycloalkyl may each be independently replaced with a heteroatom group selected from —O—, —S—, and —N(R⁵²)— and —CH₃ of the alkyl may each be independently replaced with a heteroatom group selected from —N(R⁵²)₂, —OR⁵², and —S(R⁵²) wherein the heteroatom groups are separated by at least 2 carbon atoms;
[0757] each R^{5′} is independently —H, —(C₃-C₂₀)cycloalkyl, —(C₁-C₆₀)alkenyl, —(C₁-C₆₀)alkynyl, or —(C₁-C₆₀)alkyl wherein one to six —CH₂— groups of the cycloalkyl or one to 20 —CH₂— groups of the alkyl may each be independently replaced with heteroatoms independently selected from —O—, —S—, and —N(R⁴⁹)— wherein the heteroatoms are separated by at least two carbon atoms, and —CH₃ of the alkyl may each be independently replaced with a heteroatom group selected from —N(R⁴⁹)₂, —OR⁴⁹, and -S(R⁴⁹) wherein the heteroatom groups are separated by at least 2 carbon atoms, and wherein the alkyl, alkenyl, alkenyl, and cycloalkyl may be substituted with halo atoms; and
[0758] each R⁵² is independently —H, —(C₁-C₂₀)alkyl, —(C₁-C₂₀)alkenyl, —(C₁-C₂₀)alkynyl, or —(C₃-C₆)cycloalkyl wherein one to six —CH₂— groups of the alkyl or cycloalkyl separated by at least two carbon atoms may each be independently replaced with a heteroatom independently selected from —O—, —S—, or —N(R⁴⁹)—, and —CH₃ of the alkyl may each be independently replaced with a heteroatom group selected from —N(R⁴⁹)₂. —OR⁴⁹, and —S(R⁴⁹) wherein the heteroatom groups are separated by at least 2 carbon atoms; and wherein the alkyl, alkenyl, alkynyl, and cycloalkyl may be substituted with halo atoms;
[0759] each R⁴⁹ is independently —H, —(C₁-C₀)alkyl, or —(C₃-C₆)cycloakyl wherein one to six —CH₂ groups of the alkyl or cycloalkyl separated by at least two carbon atoms may be replaced with —O—, —S—, or —N(R^{49a})—, and —CH₃ of the alkyl may be replaced with a heteroatom group selected from —N(R^{49a})₂, —OR^{49a}, and —S(R^{49a}) wherein the heteroatom groups are separated by at least 2 carbon atoms; and wherein the alkyl and cycloalkyl may be substituted with halo atoms and wherein each R^{49a} is independently —H, —(C₁-C₆)alkyl, or —(C₃-C₆)cycloalkyl;
[0760] each R⁴⁹3 is independently —H, —(C₁-C₆)alkyl, or —(C₃-C₆)cycloalkyl;
   [0761] and Z¹¹ is a compound of Formula (B), wherein connection site with L² is indicated:

[chemical structure]

[0762] each R⁴⁷ is independently —OH, —N₃, —N(R⁴⁸)₂, —N(R⁴⁸)—C(O)—R⁴⁸, —N(R⁴⁸)—C(O)—N(R⁴⁸)₂, N(R⁴⁸)—C(O)—OR⁴⁸, —N(R⁴⁸)—S(O)₂—R⁴⁸, tetrazole, or triazole, wherein the tetrazole and triazole are optionally substituted with R⁴⁸;
[0763] each R⁴⁸ is independently —H, —(C₁-C₅)alkyl, halo-substituted —(C₁-C₅)alkyl, halo substituted —(C₃-C₆)cycloalkyl, —(C₁-C₅)alkenyl, —(C₁-C₅)alkynyl, halo substituted —(C₁-C₅)alkenyl, halo substituted —(C₁-C₅)alkynyl, or —(C₃-C₆)cycloakyl, wherein a —CH₂— group of the alkyl or cycloalkyl may each be independently replaced with a heteroatom group selected from —O—, —S—, and —N(R⁵²)— and —CH₃ of the alkyl may each be independently replaced with a heteroatom group selected from —N(R⁵²)₂, —OR⁵², and —S(R⁵²) wherein the heteroatom groups are separated by at least 2 carbon atom;
[0764] each R⁴⁹ is independently —H, —(C₁-C₂₀)alkyl, or —(C₃-C₆)cycloalkyl wherein one to six —CH₂-groups of the alkyl or cycloalkyl separated by at least two carbon atoms may be replaced with —O—, —S—, or —N(R^{49a})—, and —CH₃ of the alkyl may be replaced with a heteroatom group selected from —N(R^{49a} a)₂, —OR^{49a}, and —S(R^{49a}) wherein the heteroatom groups are separated by at least 2 carbon atoms; and wherein the alkyl and cycloalkyl may be substituted with halo atoms and wherein each R^{49a} is independently —H, —(C₁-C₆)alkyl, or —(C₁-C₆)cycloalkyl;
   46. each R⁵² is independently —H, —(C₁-C₂₀)alkyl, —(C₁-C₂₀)alkenyl, —(C₁-C₂₁)alkynyl, or —(C₃-C₆)cycloalkyl wherein one to six —CH₂— groups of the alkyl or cycloalkyl separated by at least two carbon atoms may each be independently replaced with a heteroatom independently selected from —O—, —S—, or —N(R⁴⁹)—, and —CH₃ of the alkyl may each be independently replaced with a heteroatom group selected from —N(R⁴⁹)₂, —OR⁴⁹, and —S(R⁴⁹) wherein the heteroatom groups are separated by at least 2 carbon atoms; and wherein the alkyl, alkenyl, alkynyl, and cycloalkyl may be substituted with halo atoms A chirally controlled PNPLA3 oligonucleotide composition comprising oligonucleotides of a particular oligonucleotide type characterized by:
[0765] a) a common base sequence and length, wherein the base sequence is complementary to a PNPLA3 target gene;
[0766] b) a common pattern of backbone linkages;
[0767] c) a common pattern of backbone chiral centers, wherein the common pattern of backbone chiral centers comprises at least one internucleotidic linkage comprising a chirally controlled chiral center;
[0768] which composition is chirally controlled in that it is enriched, relative to a substantially racemic preparation of oligonucleotides having the same common base sequence and length, for oligonucleotides of the particular oligonucleotide type; and
[0769] wherein the oligonucleotide composition is capable of decreasing the expression, level and/or activity of a PNPLA3 target gene or a gene product thereof.

[0770] In some embodiments, the oligonucleotides are capable of capable of decreasing the expression, level and/or activity of a PNPLA3 target gene or a gene product thereof via a mechanism mediated by RNaseH, steric hindrance and/or RNA interference.

[0771] In some embodiments, the present disclosure pertains to: a composition comprising a compound of any one of the preceding claims.

[0772] In some embodiments, the present disclosure pertains to: a composition comprising an PNPLA3 oligonucleotide which is a single-stranded RNAi agent, wherein the single-stranded RNAi agent is complementary or substantially complementary to a PNPLA3 target RNA sequence,
[0773] has a length of about 15 to about 49 nucleotides, and
[0774] is capable of directing target-specific RNA interference,
[0775] wherein the single-stranded RNAi agent comprises at least one non-natural base, sugar, and/or internucleotidic linkage, and
[0776] wherein the composition is capable of decreasing the expression, level and/or activity of a PNPLA3 target gene or a gene product thereof.

[0777] In some embodiments, the oligonucleotide or oligonucleotides further comprise a bridged bicyclic ketal.

[0778] In some embodiments, R^{CD} is

[chemical structure]

[0779] In some embodiments, R^{CD} is

[chemical structure]

[0780] In some embodiments, R^{CD} is of such a structure that R^{CD}—H is

[chemical structure]

[chemical structure]

[0781] In some embodiments, R^{CD} is connected to the oligonucleotide or oligonucleotides through a linker.

[0782] In some embodiments, the linker is L^{M}.

[0783] In some embodiments, the linker has the structure of

[chemical structure]

[chemical structure]

[0784] In some embodiments, R^{CD} is selected from:

[chemical structure]

[chemical structure]

[chemical structure]

[0785] In some embodiments, the present disclosure pertains to: a pharmaceutical composition comprising a composition of any one of the preceding claims in a therapeutically effective amount, in admixture with at least one pharmaceutically acceptable excipient.

[0786] In some embodiments, the composition further comprises at least one additional pharmaceutical agent selected from the group consisting of an anti-inflammatory agent, an anti-diabetic agent, and a cholesterol/lipid modulating agent.

[0787] In some embodiments, said additional pharmaceutical agent is selected from the group consisting of an acetyl-CoA carboxylase- (ACC) inhibitor, a diacylglycerol O-acyltransferase 1 (DGAT-1) inhibitor, a diacylglycerol O-acyltransferase 2 (DGAT-2) inhibitor, monoacylglycerol O-acyltransferase inhibitors, a phosphodiesterase (PDE)-10 inhibitor, an AMPK activator, a sulfonylurea, a meglitinide, an α-amylase inhibitor, an α-glucoside hydrolase inhibitor, an α-glucosidase inhibitor, a PPARγ agonist, a PPAR α/γ agonist, a biguanide, a glucagon-like peptide 1 (GLP-1) modulator, liraglutide, albiglutide, exenatide, albiglutide, lixisenatide, dulaglutide, semaglutide, a protein tyrosine phosphatase-1B (PTP-1B) inhibitor. SIRT-1 activator, a dipeptidyl peptidase IV (DPP-IV) inhibitor, an insulin secretagogue, a fatty acid oxidation inhibitor, an A2 antagonist, a c-jun amino-terminal kinase (JNK) inhibitor, glucokinase activators (GKa), insulin, an insulin mimetic, a glycogen phosphorylase inhibitor, a VPAC2 receptor agonist, SGLT2 inhibitors, a glucagon receptor modulator, GPR1.19 modulators, FGF21 derivatives or analogs. TGR5 receptor modulators, GPBAR1 receptor modulators, GPR40 agonists, GPR120 modulators, high affinity nicotinic acid receptor (HM74A) activators, SGLT1 inhibitors, inhibitors or modulators of carnitine palmitoyl transferase enzymes, inhibitors of fructose 1,6-diphosphatase, inhibitors of aldose reductase, mineralocorticoid receptor inhibitors, inhibitors of TORC2, inhibitors of CCR2 and/or CCR5, inhibitors of PKC isoforms (e.g. PKCα, PKCβ, PKCγ), inhibitors of fatty acid synthetase, inhibitors of serine palmitoyl transferase, modulators of GPR81, GPR39, GPR43, GPR41, GPR105, Kv1.3, retinol binding protein 4, glucocorticoid receptor, somatostatin receptors, inhibitors or modulators of PDHK2 or PDFTK4, inhibitors of MAP4K4, modulators of IL1 family including IL1beta, HMG-CoA reductase inhibitors, squalene synthetase inhibitors, fibrates, bile acid sequestrants, ACAT inhibitors, MTP inhibitors, lipoxygenase inhibitors, cholesterol absorption inhibitors, PCSK9 modulators, cholesterol ester transfer protein inhibitors and modulators of RXRalpha.

[0788] In some embodiments, the composition further comprises at least one additional pharmaceutical agent selected from the group consisting of cystamine or a pharmaceutically acceptable salt thereof, cystamine or a pharmaceutically acceptable salt thereof, an anti-oxidant compound, lecithin, vitamin B complex, a bile salt preparations, an antagonists of Cannabinoid-1 (CB1) receptor, an inverse agonists of Cannabinoid-1 (CB 1) receptor, a peroxisome proliferator-activated receptor) activity regulators, a benzothiazepine or benzothiepine compound, an RNA antisense construct to inhibit protein tyrosine phosphatase PTPRU, a heteroatom-linked substituted piperidine and derivatives thereof, an azacyclopentane derivative capable of inhibiting stearoyl-coenzyme alpha delta-9 desaturase, acylamide compound having secretagogue or inducer activity of adiponectin, a quaternary ammonium compound, Glatiramer acetate, pentraxin proteins, a HMG-CoA reductase inhibitor, n-acetyl cysteine, isoflavone compound, a macrolide antibiotic, a galectin inhibitor, an antibody, or any combination of thereof.

[0789] In some embodiments, the present disclosure pertains to: a method for the reduction of at least one point in severity of nonalcoholic fatty liver disease or nonalcoholic steatohepatitis grading scoring systems, reduction of the level of serum markers of nonalcoholic steatohepatitis activity, reduction of nonalcoholic steatohepatitis disease activity or reduction in the medical consequences of nonalcoholic steatohepatitis in humans comprising the step of administering to a human in need of such reduction a therapeutically effective amount of a composition of any one of the preceding claims to a patient in need thereof.

[0790] In some embodiments, the present disclosure pertains to: a method for treating fatty liver, nonalcoholic fatty liver disease, nonalcoholic steatohepatitis, nonalcoholic steatohepatitis with liver fibrosis, nonalcoholic steatohepatitis with cirrhosis, or nonalcoholic steatohepatitis with cirrhosis and hepatocellular carcinoma in humans comprising the step of administering to a human in need of such treatment a therapeutically effective amount of a composition of any one of the preceding claims to a patient in need thereof.

[0791] In some embodiments, the present disclosure pertains to: a method for treating hyperlipidemia, Type I diabetes, Type II diabetes mellitus, idiopathic Type I diabetes (Type Ib), latent autoimmune diabetes in adults (LADA), early-onset Type 2 diabetes (EOD), youth-onset atypical diabetes (YOAD), maturity onset diabetes of the young (MODY), malnutrition-related diabetes, gestational diabetes, coronary heart disease, ischemic stroke, restenosis after angioplasty, peripheral vascular disease, intermittent claudication, myocardial infarction, dyslipidemia, post-prandial lipemia, conditions of impaired glucose tolerance (IGT), conditions of impaired fasting plasma glucose, metabolic acidosis, ketosis, arthritis, obesity, osteoporosis, hypertension, congestive heart failure, left ventricular hypertrophy, peripheral arterial disease, diabetic retinopathy, macular degeneration, cataract, diabetic nephropathy, glomerulosclerosis, chronic renal failure, diabetic neuropathy, metabolic syndrome, syndrome X premenstrual syndrome, angina pectoris, thrombosis, atherosclerosis, transient ischemic attacks, stroke, vascular restenosis, hyperglycemia, hyperinsulinemia, hypertriglyceridemia, insulin resistance, impaired glucose metabolism, erectile dysfunction, skin and connective tissue disorders, foot ulcerations and ulcerative colitis, endothelial dysfunction and impaired vascular compliance, hyper apo B lipoproteinemia, Alzheimer's, schizophrenia, impaired cognition, inflammatory bowel disease, ulcerative colitis, Crohn's disease, and irritable bowel syndrome, non-alcoholic steatohepatitis (NASH), or non-alcoholic fatty liver disease (NAFLD), in humans comprising the step of administering to a human in need of such treatment a therapeutically effective amount of a composition of any one of the preceding claims to a patient in need thereof.

[0792] In some embodiments, the present disclosure pertains to: a method for treating fatty liver, nonalcoholic fatty liver disease, nonalcoholic steatohepatitis, nonalcoholic steatohepatitis with liver fibrosis, nonalcoholic steatohepatitis with cirrhosis, or nonalcoholic steatohepatitis with cirrhosis and hepatocellular carcinoma in humans comprising the step of administering to a human in need of such treatment a therapeutically effective amount of two separate pharmaceutical compositions comprising
[0793] a. a first composition of any one of the preceding claims; and
[0794] b. a second composition comprising at least one additional pharmaceutical agent selected from the group consisting of an anti-inflammatory agent, an anti-diabetic agent, and a cholesterol/lipid modulating agent and at least one pharmaceutically acceptable excipient.

[0795] In some embodiments, said first composition and said second composition are administered simultaneously.

[0796] In some embodiments, said first composition and said second composition are administered sequentially and in any order.

[0797] In some embodiments, the present disclosure pertains to: a method for reducing portal hypertension, hepatic protein synthetic capability, hyperbilirubinemia, or encephalopathy in humans comprising the step of administering to a human in need of such treatment a therapeutically effective amount of a composition of any one of the preceding claims to a patient in need thereof.

[0798] In some embodiments, the present disclosure pertains to: a method of decreasing the expression, activity and/or level of a PNPLA3 target gene or a gene product thereof in a cell, comprising the step of contacting the cell with a compound or composition of any one of the preceding claims.

[0799] In some embodiments, the present disclosure pertains to: a method of decreasing the expression, activity and/or level of a PNPLA3 target gene or a gene product thereof in a patient, comprising the step of contacting the cell with a compound or composition of any one of the preceding claims.

[0800] In some embodiments, a GaINAc, as the term is used herein, refers to a chemical entity which is structurally similar to a GaINAc and/or which performs at least one function of a GaINAc (e.g, binding to ASPGR).

[0801] In some embodiments, a 5′-end of a single-stranded RNAi agent comprises a GaINAc or a variant or derivative thereof.

[0802] A non-limiting example of a GaINAc moiety at the 5′-end of a PNPLA3 oligonucleotide or single-stranded RNAi agent (e.g., 5′ GalNAc moiety) is shown below, wherein the 5′ end structure is represented by:

[chemical structure]

[0803] In some embodiments, a GalNAc moiety, e.g., aGalNAc or a variant or derivative thereof, is described in any of: Migawa et al. 2016 Bioorg. Med. Chem. Lett. 26: 2914-7; Ostergaard et al. 2015 Bioconjug. Chem. 26: 1451-1.455; Prakash et al. 2014. Nucl. Acids Res. 42: 8736-8807; Prakash et al. 2016 J. Med. Chem. 59: 2718-33; Shemesh et al. 2016 Mol. Ther. Nucl. Acids 5: e319; St-Pierre et al. 2016 Bioorg. Med. Chem. 24: 2397-409; and/or Yu et al. 2016 Mol. Ther. Nucl. Acids 5: e317.

[0804] In some embodiments, a chemical moiety (e.g., additional component) conjugated to a PNPLA3 oligonucleotide binds to ASPGR.

[0805] In some embodiments, a chemical moiety (e.g., additional component) conjugated to a PNPLA3 oligonucleotide binds to ASPGR and comprises any of: Mod031. Mod034, Mod035, Mod036, Mod038, Mod039, Mod 040, or Mod041.

[0806] In some embodiments, an additional component can be or comprise any of: Mod079, Mod080, Mod081, Mod082 or Mod083. In some embodiments, an additional component can be or comprise any of:

[chemical structure]

[chemical structure]

[chemical structure]

[chemical structure]

[chemical structure]

[0807] In some embodiments, an additional component can be or comprise:

[chemical structure]

wherein Mod061 is conjugated to three identical or non-identical oligonucleotides.

[0808] 5′ Nucleoside or 5′ Nucleotide of a PNPLA3 Oligonucleotide

[0809] In some embodiments, provided oligonucleotides are capable of directing a decrease in the expression and/or level of a target gene or its gene product, in some embodiments, provided oligonucleotides are capable of directing a decrease in the expression and/or level of a target gene or its gene product via RNA interference, in some embodiments, provided oligonucleotides are capable of directing a decrease in the expression and/or level of a target gene or its gene product via a biochemical mechanism which does not involve RNA interference or RISC (including, but not limited to, RNaseH-mediated knockdown or steric hindrance of gene expression). In some embodiments, provided oligonucleotides are capable of directing a decrease in the expression and/or level of a target gene or its gene product via RNA interference and/or RNaseH-mediated knockdown. In some embodiments, provided oligonucleotides are capable of directing a decrease in the expression and/or level of a target gene or its gene product by sterically blocking translation after annealing to a target gene mRNA, and/or by altering or interfering with mRNA splicing and/or exon inclusion or exclusion. In some embodiments, provided oligonucleotides can comprise any 5′-nucleoside or 5′-nucleotide described herein or known in the art.

[0810] In some embodiments, the 5′ nucleoside, e.g., the nucleoside at the 5′-end, of a single-stranded RNAi agent (e.g., in N1) can be any nucleoside, modified nucleoside or universal nucleoside known in the art.

[0811] In some embodiments, the 5′ nucleotide, e.g., the nucleoside at the 5′-end, of a single-stranded RNAi agent (e.g, in N1) can comprise a 2′ modification at the base.

[0812] In some embodiments, the nucleoside at the 5′-end of a single-stranded RNAi agent (e.g, in N1) can comprise a 2′-deoxy (DNA), 2′-F, 2′-OMe, or 2′-MOE, or an inverted nucleoside or nucleotide.

[0813] Non-limiting examples of ssRNAi agent formats in which the nucleoside at the 5′-end of the ssRNAi agent is a 2′-deoxy (DNA) include: Formats 1-5, 16-18, 22-29, 32-78, 84-93, 97, and 103-107 of FIG. 1.

[0814] Non-limiting examples of ssRNAi agent formats in which the nucleoside at the 5′-end of the ssRNAi agent is a 2′-F include: Formats 11-15, 19, 79-83, and 98-100 of FIG. 1.

[0815] Non-limiting examples of ssRNAi agent formats in which the nucleoside at the 5′-end of the ssRNAi agent is a 2′-OMe include: Formats 6-10, 20-21, 30-31, 94-96, and 101-102 of FIG. 1.

[0816] In some embodiments, the nucleobase at the 5′-end of a single-stranded RNAi agent (e.g., in N1) is T. In some embodiments, the nucleobase at the 5′-end of a single-stranded RNAi agent (e.g, in N1) is U. In some embodiments, the nucleobase at the 5′-end of a single-stranded RNAi agent (e.g, in N1) is A. In some embodiments, the nucleobase at the 5′-end of a single-stranded RNAi agent (e.g., in N1) is G. In some embodiments, the nucleobase at the 5′-end of a single-stranded RNAi agent (e.g., in N1) is C.

[0817] In some embodiments, a provided single-stranded RNAi agent has a 5′ mismatch, wherein the nucleobase at the 5′-end of the single-stranded RNAi agent (position N1) has a mismatch from the corresponding position of the target transcript. As has been reported in the art, complementarity between the 5′ nucleotide moiety and the corresponding position of the target transcript is not required for efficacious double-stranded siRNAs. Various example single-stranded RNAi agents described herein also have a 5′ mismatch and are still capable of directing RNA interference. Efficacious ssRNAi agents have been constructed which have a mismatch with the sequence of the target mRNA at the 5′ position (N1). Efficacious ssRNAi agents have been constructed which have a mismatch with the sequence of the target mRNA at the 5′ position and the N1 position of the ssRNAi is T. In some embodiments, a provided single-stranded RNAi agent has a 5′ mismatch at N1, wherein the nucleobase in N1 is T.

[0818] In some embodiments, the nucleoside at the 5′ position is a LNA.

[0819] In some embodiments, the nucleoside at the 5′ position is a 5′-H (deoxy). Efficacious ssRNAi agents have been constructed wherein the nucleoside at the 5′ position is a 5′-H (deoxy), in some embodiments, the nucleoside at the 5′ position is deoxy T, A, G, or C. In some embodiments, the nucleoside at the 5′ position is deoxy T. In some embodiments, the nucleoside at the 5′ position is deoxy A. In some embodiments, the nucleoside at the 5′ position is a 2′-F. Efficacious ssRNAi agents have been constructed wherein the nucleoside at the 5′ position is a 2′-F. In some embodiments, the nucleoside at the 5′ position is a 2′-F A. In some embodiments, the nucleoside at the 5′ position is a 2′-F G. In some embodiments, the nucleoside at the 5′ position is a 2′-OMe. Efficacious ssRNAi agents have been constructed wherein the nucleoside at the 5′ position is a 2′-OMe. In some embodiments, the nucleoside at the 5′ position is a 2′-OMe U. In some embodiments, the nucleoside at the 5′ position is a 2′-OMe A. In some embodiments, the nucleoside at the 5′ position is a 2′-OMe C.

[0820] Seed region of a PNPLA3 oligonucleotide, including a single-stranded RNAi agent

[0821] In some embodiments, a PNPLA3 oligonucleotide, a PNPLA3 oligonucleotide that directs RNA interference, a PNPLA3 oligonucleotide that directs RNase H-mediated knockdown, or a PNPLA3 oligonucleotide that directs both RNA interference and RNase H-mediated knockdown can comprise any seed region or portion or structural element thereof described herein or known in the art.

[0822] In some embodiments, a seed region of a provided single-stranded RNAi agent is a portion of the RNAi agent which is particularly important in binding of the RNAi agent to a transcript target Lim et al. 2005 Nature 433: 769-773. In many cases, full complementarity between the seed region of the RNAi agent antisense strand and the mRNA target is reportedly required for high RNAi activity. For example, a single mismatch at position 6 in the seed region reportedly abolished double-stranded RNAi activity; Lim et al. 2005 Nature 433: 769-773. In contrast, dsRNAi antisense strands reportedly are more amenable to mismatches outside the seed region, e.g., at the 5′ position, in the post-seed region, and in the 3′-terminal dinucleotide.

[0823] In some embodiments, each nucleotide in the seed region is 2′-OMe.

[0824] In some embodiments, each nucleotide in the seed region is 2′-OMe, and each nucleotide in the post-seed region is 2′-OMe.

[0825] In some embodiments, one nucleotide in the seed region is 2′-F and each other nucleotide in the seed region is 2′-OMe.

[0826] In some embodiments, one nucleotide in the seed region is 2′-F and each other nucleotide in the seed region is 2′-OMe, and one nucleotide in the post-seed region is 2′-F and each other nucleotide in the post-seed region is 2′-OMe.

[0827] In some embodiments, the nucleotide at position 2 (counting from the 5′-end) is 2′-F and each other nucleotide in the seed region is 2′-OMe, and one nucleotide in the post-seed region is 2′-F and each other nucleotide in the post-seed region is 2′-OMe.

[0828] In some embodiments, the nucleotide at position 2 (counting from the 5′-end) is 2′-F and each other nucleotide in the seed region is 2′-OMe, and the nucleotide at position 14 (counting from the 5′-end) is 2′-F and each other nucleotide in the post-seed region is 2′-OMe.

[0829] In some embodiments, a provided single-stranded RNAi agent comprises a seed region in which any number of N can be 2′-deoxy, 2′-F, 2′-OMe and/or 2′-OH, and/or have any other modification at the 2′ position of the sugar.

[0830] Various non-limiting examples of seed regions of single-stranded RNAi agents are presented in Table 1 A, the Figures, and elsewhere herein. In some embodiments, a provided single-stranded RNAi agent comprises a seed region, in which any one or more nucleotides in the seed region are independently 2′-F. In some embodiments, a provided single-stranded RNAi agent comprises a seed region, in which any 2 or more nucleotides in the seed region are independently 2′-F. In some embodiments, a provided single-stranded RNAi agent comprises a seed region, in which any 3 or more nucleotides in the seed region are independently 2′-F. In some embodiments, a provided single-stranded RNAi agent comprises a seed region, in which any 4 or more nucleotides in the seed region are independently 2′-F. In some embodiments, a provided single-stranded RNAi agent comprises a seed region, in which any 5 or more nucleotides in the seed region are independently 2′-F. In some embodiments, a provided single-stranded RNAi agent comprises a seed region, in which any 6 or more nucleotides in the seed region are independently 2′-F.

[0831] In some embodiments, a provided single-stranded RNAi agent comprises a seed region, in which any one or more nucleotides in the seed region are independently 2′-OMe. In some embodiments, a provided single-stranded RNAi agent comprises a seed region, in which any 2 or more nucleotides in the seed region are independently 2′-OMe. In some embodiments, a provided single-stranded RNAi agent comprises a seed region, in which any 3 or more nucleotides in the seed region are independently 2′-OMe. In some embodiments, a provided single-stranded RNAi agent comprises a seed region, in which any 4 or more nucleotides in the seed region are independently 2′-OMe, in some embodiments, a provided single-stranded RNAi agent comprises a seed region, in which any 5 or more nucleotides in the seed region are independently 2′-OMe, in some embodiments, a provided single-stranded RNAi agent comprises a seed region, in which any 6 or more nucleotides in the seed region are independently 2′-OMe. In some embodiments, a provided single-stranded RNAi agent comprises a seed region, in which 7 of N2 to N7 are independently 2′-OMe.

[0832] In some embodiments, a provided single-stranded RNAi agent comprises a seed region, in which any one or more nucleotides in the seed region are independently 2′-MOE. In some embodiments, a provided single-stranded RNAi agent comprises a seed region, in which any 2 or more nucleotides in the seed region are independently 2′-MOE, in some embodiments, a provided single-stranded RNAi agent comprises a seed region, in which any 3 or more nucleotides in the seed region are independently 2′-MOE in some embodiments, a provided single-stranded RNAi agent comprises a seed region, in which any 4 or more nucleotides in the seed region are independently 2′-MOE. In some embodiments, a provided single-stranded RNAi agent comprises a seed region, in which any 5 or more nucleotides in the seed region are independently 2′-MOE. In some embodiments, a provided single-stranded RNAi agent comprises a seed region, in which any 6 or more nucleotides in the seed region are independently 2′-MOE. In some embodiments, a provided single-stranded RNAi agent comprises a seed region, in which 7 of N2 to N7 are independently 2′-MOE.

[0833] In some embodiments, a provided single-stranded RNAi agent comprises a seed region, in which any one or more nucleotides in the seed region are independently 2′-deoxy, in some embodiments, a provided single-stranded RNAi agent comprises a seed region, in which any 2 or more nucleotides in the seed region are independently 2′-deoxy. In some embodiments, a provided single-stranded RNAi agent comprises a seed region, in which any 3 or more nucleotides in the seed region are independently 2′-deoxy. In some embodiments, a provided single-stranded RNAi agent comprises a seed region, in which any 4 or more nucleotides in the seed region are independently 2′-deoxy. In some embodiments, a provided single-stranded RNAi agent comprises a seed region, in which any 5 or more nucleotides in the seed region ale independently 2′-deoxy. In some embodiments, a provided single-stranded RNAi agent comprises a seed region, in which any 6 or more nucleotides in the seed region are independently 2′-deoxy. In some embodiments, a provided single-stranded RNAi agent comprises a seed region, in which 7 of N2 to N7 are independently 2′-deoxy.

[0834] In some embodiments, a provided single-stranded RNAi agent comprises a seed region, in which any one or more non-consecutive nucleotides in the seed region are independently 2′-F. In some embodiments, a provided single-stranded RNAi agent comprises a seed region, in which any 2 or more non-consecutive nucleotides in the seed region are independently 2′-F. In some embodiments, a provided single-stranded RNAi agent comprises a seed region, in which any 3 or more non-consecutive nucleotides in the seed region are independently 2′-F. In some embodiments, a provided single-stranded RNAi agent comprises a seed region, in which any 4 or more non-consecutive nucleotides in the seed region am independently T-F.

[0835] In some embodiments, a provided single-stranded RNAi agent comprises a seed region, in which any one or more non-consecutive nucleotides in the seed region are independently 2′-OMe, in some embodiments, a provided single-stranded RNAi agent comprises a seed region, in which any 2 or more non consecutive nucleotides in the seed region are independently 2′-OMe. In some embodiments, a provided single-stranded RNAi agent comprises a seed region, in which any 3 or more non-consecutive nucleotides in the seed region are independently 2′-OMe, in some embodiments, a provided single-stranded RNAi agent comprises a seed region, in which any 4 or more non-consecutive nucleotides in the seed region are independently 2′-OMe.

[0836] In some embodiments, a provided single-stranded RNAi agent comprises a seed region, in which any one or more non-consecutive nucleotides in the seed region are independently 2′-MOE. In some embodiments, a provided single-stranded RNA agent comprises a seed region, in which any 2 or more in the seed region are independently 2′-MOE. In some embodiments, a provided single-stranded RNAi agent comprises a seed region, in which any 3 or more non-consecutive nucleotides in the seed region are independently 2′-MOE. In some embodiments, a provided single-stranded RNAi agent comprises a seed region, in which any 4 or more non-consecutive nucleotides in the seed region are independently 2′-MOE.

[0837] In some embodiments, a provided single-stranded RNAi agent comprises a seed region, in which any one or more non-consecutive nucleotides in the seed region are independently 2′-deoxy. In some embodiments, a provided single-stranded RNAi agent comprises a seed region, in which any 2 or more non consecutive nucleotides in the seed region are independently 2′-deoxy, in some embodiments, a provided single-stranded RNAi agent comprises a seed region, in which any 3 or more non-consecutive nucleotides in the seed region are independently 2′-deoxy, in some embodiments, a provided single-stranded RNAi agent comprises a seed region, in which any 4 or more non-consecutive nucleotides in the seed region am independently 2′-deoxy.

[0838] In some embodiments, a provided single-stranded RNAi agent comprises a seed region, in which any 3 of the nucleotides in the seed region are independently 2′-deoxy.

[0839] In some embodiments, a provided single-stranded RNAi agent comprises a seed region, in which any one or more internucleotidic linkages in the seed region am independently PO (phosphodiester). In some embodiments, a provided single-stranded RNAi agent comprises a seed region, in which any 2 or more internucleotidic linkages in the seed region are independently PO. In some embodiments, a provided single-stranded RNAi agent comprises a seed region, in which any 3 or more internucleotidic linkages in the seed region are independently PO. In some embodiments, a provided single-stranded RNAi agent comprises a seed region, in which any 4 or more internucleotidic linkages in the seed region am independently PO. In some embodiments, a provided single-stranded RNAi agent comprises a seed region, in which any 5 or more internucleotidic linkages in the seed region are independently PO. In some embodiments, a provided single-stranded RNAi agent comprises a seed region, in which any 6 or more internucleotidic linkages in the seed region are independently PO. In some embodiments, a provided single-stranded RNAi agent comprises a seed region, in which 7 of N2 to N7 are independently PO.

[0840] In some embodiments, a provided single-stranded RNAi agent comprises a seed region, in which any one or more internucleotidic linkages in the seed region are independently PS (phosphorothioate). In some embodiments, a provided single-stranded RNAi agent comprises a seed region, in which any 2 or more internucleotidic linkages in the seed region are independently PS. In some embodiments, a provided single-stranded RNAi agent comprises a seed region, in which any 3 or mom internucleotidic linkages in the seed region are independently PS. In some embodiments, a provided single-stranded RNAi agent comprises a seed region, in which any 4 or more internucleotidic linkages in the seed region are independently PS. In some embodiments, a provided single-stranded RNAi agent comprises a seed region, in which any 5 or more internucleotidic linkages in the seed region are independently PS, in some embodiments, a provided single-stranded RNAi agent comprises a seed region, in which any 6 or more internucleotidic linkages in the seed region are independently PS. In some embodiments, a provided single-stranded RNAi agent comprises a seed region, in which 7 of N2 to N7 are independently PS.

[0841] In some embodiments, a provided single-stranded RNAi agent comprises a seed region, in which any one or more internucleotidic linkages in the seed region am independently Sp (phosphorothioate in the Sp configuration). In some embodiments, a provided single-stranded RNAi agent comprises a seed region, in which any 2 or more internucleotidic linkages in the seed region are independently Sp. In some embodiments, a provided single-stranded RNAi agent comprises a seed region, in which any 3 or mom internucleotidic linkages in the seed region are independently Sp. In some embodiments, a provided single-stranded RNAi agent comprises a seed region, in which any 4 or more internucleotidic linkages in the seed region are independently Sp. In some embodiments, a provided single-stranded RNAi agent comprises a seed region, in which any 5 or more internucleotidic linkages in the seed region are independently Sp. In some embodiments, a provided single-stranded RNAi agent comprises a seed region, in which any 6 or more internucleotidic linkages in the seed region are independently Sp. In some embodiments, a provided single-stranded RNAi agent comprises a seed region, in which 7 of N2 to N7 are independently Sp.

[0842] In some embodiments, a provided single-stranded RNAi agent comprises a seed region, in which any one or more internucleotidic linkages in the seed region are independently Rp (phosphorothioate in the Rp configuration). In some embodiments, a provided single-stranded RNAi agent comprises a seed region, in which any 2 or more internucleotidic linkages in the seed region are independently Rp, in some embodiments, a provided single-stranded RNAi agent comprises a seed region, in which any 3 or more internucleotidic linkages in the seed region are independently Rp. In some embodiments, a provided single-stranded RNAi agent comprises a seed region, in which any 4 or more internucleotidic linkages in the seed region are independently Rp. In some embodiments, a provided single-stranded RNAi agent comprises a seed region, in which any 5 or more internucleotidic linkages in the seed region are independently Rp. In some embodiments, a provided single-stranded RNAi agent comprises a seed region, in which any 6 or more internucleotidic linkages in the seed region are independently Rp. In some embodiments, a provided single-stranded RNAi agent comprises a seed region, in which 7 of N2 to N7 are independently Rp.

[0843] In some embodiments, a provided single-stranded RNAi agent comprises a seed region, in which any one or more non-consecutive internucleotidic linkages in the seed region are independently PO. In some embodiments, a provided single-stranded RNAi agent comprises a seed region, in which any 2 or more non-consecutive internucleotidic linkages in the seed region are independently PO. In some embodiments, a provided single-stranded RNAi agent comprises a seed region, in which any 3 or more non-consecutive internucleotidic linkages in the seed region are independently PO. In some embodiments, a provided single-stranded RNAi agent comprises a seed region, in which any 4 or more non-consecutive internucleotidic linkages in the seed region are independently PO.

[0844] In some embodiments, a provided single-stranded RNAi agent comprises a seed region, in which any one or more non-consecutive internucleotidic linkages in the seed region are independently Sp, in some embodiments, a provided single-stranded RNAi agent comprises a seed region, in which any 2 or more non-consecutive internucleotidic linkages in the seed region are independently Sp. In some embodiments, a provided single-stranded RNA agent comprises a seed region, in which any 3 or more non-consecutive internucleotidic linkages in the seed region are independently Sp. In some embodiments, a provided single-stranded RNAi agent comprises a seed region, in which any 4 or more non-consecutive internucleotidic linkages in the seed region are independently Sp.

[0845] In some embodiments, a provided single-stranded RNAi agent comprises a seed region, in which any one or more non-consecutive internucleotidic linkages in the seed region are independently Rp. In some embodiments, a provided single-stranded RNAi agent comprises a seed region, in which any 2 or more non-consecutive internucleotidic linkages in the seed region are independently Rp. In some embodiments, a provided single-stranded RNAi agent comprises a seed region, in which any 3 or more non-consecutive internucleotidic linkages in the seed region are independently Rp. In some embodiments, a provided single-stranded RNAi agent comprises a seed region, in which any 4 or more non-consecutive internucleotidic linkages in the seed region are independently Rp.

[0846] In some embodiments, a provided single-stranded RNAi agent comprises a seed region, in which any one or more non-consecutive internucleotidic linkages in the seed region are independently PS. In some embodiments, a provided single-stranded RNAi agent comprises a seed region, in which any 2 or more non-consecutive internucleotidic linkages in the seed region are independently PS. In some embodiments, a provided single-stranded RNAi agent comprises a seed region, in which any 3 or more non consecutive internucleotidic linkages in the seed region are independently PS, in some embodiments, a provided single-stranded RNAi agent comprises a seed region, in which any 4 or more non-consecutive internucleotidic linkages in the seed region are independently PS.

[0847] In some embodiments, a provided single-stranded RNAi agent comprises a seed region, in which the pattern of 2′ modifications of the nucleotides comprises the pattern of 2′ modifications of the nucleotides in the seed region of any single-stranded RNAi format shown in FIG. 1.

[0848] In some embodiments, a provided single-stranded RNAi agent comprises a seed region, in which the pattern of 2′ modifications of the nucleotides comprises: fmfmfm, where f is 2′-F and m is 2′-OMe.

[0849] In some embodiments, a provided single-stranded RNAi agent comprises a seed region, in which the pattern of 2′ modifications of the nucleotides comprises: fmfmfmf, where f is 2′-F and m is 2′-OMe.

[0850] In some embodiments, a provided single-stranded RNAi agent comprises a seed region, in which the pattern of 2′ modifications of the nucleotides comprises: mfmfmf, where f is 2′-F and m is 2′-OMe.

[0851] In some embodiments, a provided single-stranded RNAi agent comprises a seed region, in which the pattern of 2′ modifications of the nucleotides comprises: fmfmf, where f is 2′-F and m is 2′-OMe.

[0852] In some embodiments, a provided single-stranded RNAi agent comprises a seed region, in which the pattern of 2′ modifications of the nucleotides comprises: mfmfmff, where f is 2′-F and m is 2′-OMe.

[0853] In some embodiments, a provided single-stranded RNAi agent comprises a seed region, in which the pattern of 2′ modifications of the nucleotides comprises: mfmfm, where f is 2′-F and m is 2′-OMe.

[0854] In some embodiments, a provided single-stranded RNAi agent comprises a seed region, in which the pattern of 2′ modifications of the nucleotides comprises: mfmfmfm, where f is 2′-F and m is 2′-OMe.

[0855] In some embodiments, a provided single-stranded RNAi agent comprises a seed region, in which the pattern of 2′ modifications of the nucleotides comprises: fmfmf, where f is 2′-F and m is 2′-OMe.

[0856] In some embodiments, a provided single-stranded RNAi agent comprises a seed region, in which the pattern of 2′ modifications of the nucleotides comprises: mfmfmfm, where f is 2′-F and m is 2′-OMe.

[0857] In some embodiments, a provided single-stranded RNAi agent comprises a seed region, in which the pattern of 2′ modifications of the nucleotides comprises: mfMfmf, where f is 2′-F, m is 2′-OMe, and M is 2′-MOE.

[0858] In some embodiments, a provided single-stranded RNAi agent comprises a seed region, in which the pattern of 2′ modifications of the nucleotides comprises: mfMfmfm, where f is 2′-F, m is 2′-OMe, and M is 2′-MOE.

[0859] In some embodiments, a provided single-stranded RNAi agent comprises a seed region, in which the pattern of 2′ modifications of the nucleotides comprises: mfMfm, where f is 2′-F, m is 2′-OMe, and M is 2′-MOE.

[0860] In some embodiments, a provided single-stranded RNAi agent comprises a seed region, in which the pattern of 2′ modifications of the nucleotides comprises: mfMf, where f is 2′-F, m is 2′-OMe, and M is 2′-MOE.

[0861] In some embodiments, a provided single-stranded RNAi agent comprises a seed region, in which the pattern of 2′ modifications of the nucleotides comprises: mfmfMf, where f is 2′-F, m is 2′-OMe, and M is 2′-MOE.

[0862] In some embodiments, a provided single-stranded RNAi agent comprises a seed region, in which the pattern of 2′ modifications of the nucleotides comprises: mfmfMfm, where f is 2′-F, m is 2′-OMe, and M is 2′-MOE.

[0863] In some embodiments, a provided single-stranded RNAi agent comprises a seed region, in which the pattern of 2′ modifications of the nucleotides comprises: mfmfM, where f is 2′-F, m is 2′-OMe, and M is 2′-MOE.

[0864] In some embodiments, a provided single-stranded RNAi agent comprises a seed region, in which the pattern of 2′ modifications of the nucleotides comprises: mfMfMf, where f is 2′-F, m is 2′-OMe, and M is 2′-MOE.

[0865] In some embodiments, a provided single-stranded RNAi agent comprises a seed region, in which the pattern of 2′ modifications of the nucleotides comprises: mfMfMfM, where f is 2′-F, m is 2′-OMe, and M is 2′-MOE.

[0866] In some embodiments, a provided single-stranded RNAi agent comprises a seed region, in which the pattern of 2′ modifications of the nucleotides comprises: mfMfM, where f is 2′-F, m is 2′-OMe, and M is 2′-MOE.

[0867] In some embodiments, a provided single-stranded RNAi agent comprises a seed region, in which the pattern of 2′ modifications of the nucleotides comprises: fdfdfd, where d is 2′-deoxy and m is 2′-OMe.

[0868] In some embodiments, a provided single-stranded RNAi agent comprises a seed region, in which the pattern of 2′ modifications of the nucleotides comprises: fdfdfdf, where d is 2′-deoxy and m is 2′-OMe.

[0869] In some embodiments, a provided single-stranded RNAi agent comprises a seed region, in which the pattern of 2′ modifications of the nucleotides comprises: dfdfdf, where d is 2′-deoxy and m is 2′-OMe.

[0870] In some embodiments, a provided single-stranded RNAi agent comprises a seed region, in which the pattern of 2′ modifications of the nucleotides comprises: fdfdf, where d is 2′-deoxy and m is 2′-OMe.

[0871] In some embodiments, a provided single-stranded RNAi agent comprises a seed region, in which the pattern of 2′ modifications of the nucleotides comprises: ffmmmm, where f is 2′-F and m is 2′-OMe.

[0872] In some embodiments, a provided single-stranded RNAi agent comprises a seed region, in which the pattern of 2′ modifications of the nucleotides comprises: fmmmm, where f is 2′-F and m is 2′-OMe.

[0873] In some embodiments, a provided single-stranded RNAi agent comprises a seed region, in which the pattern of 2′ modifications of the nucleotides comprises: ffmmm, where f is 2′-F and m is 2′-OMe.

[0874] In some embodiments, a provided single-stranded RNAi agent comprises a seed region, in which the pattern of 2′ modifications of the nucleotides comprises: ffmm, where f is 2′-F and m is 2′-OMe.

[0875] In some embodiments, a provided single-stranded RNAi agent comprises a seed region, in which the pattern of 2′ modifications of the nucleotides comprises: ffmmmmmm, where f is 2′-F and m is 2′-OMe.

[0876] In some embodiments, a provided single-stranded RNAi agent comprises a seed region, in which the pattern of 2′ modifications of the nucleotides comprises: ffmmmmm, where f is 2′-F and m is 2′-OMe.

[0877] In some embodiments, a provided single-stranded RNAi agent comprises a seed region, in which the pattern of 2′ modifications of the nucleotides comprises: mmmm, where m is 2′-OMe.

[0878] In some embodiments, a provided single-stranded RNAi agent comprises a seed region, in which the pattern of 2′ modifications of the nucleotides comprises: mmmmm, where m is 2′-OMe.

[0879] In some embodiments, a provided single-stranded RNAi agent comprises a seed region, in which the pattern of 2′ modifications of the nucleotides comprises: mmmmmm, where m is 2′-OMe.

[0880] In some embodiments, a provided single-stranded RNAi agent comprises a seed region, in which the pattern of 2′ modifications of the nucleotides comprises: mfmfm, where f is 2′-F and m is 2′-OMe.

[0881] In some embodiments, a provided single-stranded RNAi agent comprises a seed region, in which the pattern of internucleotidic linkages comprises the pattern of internucleotidic linkages in the seed region of any single-stranded RNAi format shown in FIG. 1.

[0882] In some embodiments, a provided single-stranded RNAi agent comprises a seed region, in which the pattern of internucleotidic linkages comprises: XOXOXO, where X is phosphorothioate and O is phosphodiester.

[0883] In some embodiments, a provided single-stranded RNAi agent comprises a seed region, in which the pattern of internucleotidic linkages comprises: XOXOXOX, where X is phosphorothioate and O is phosphodiester.

[0884] In some embodiments, a provided single-stranded RNAi agent comprises a seed region, in which the pattern of internucleotidic linkages comprises: OXOXOX, where X is phosphorothioate and O is phosphodiester.

[0885] In some embodiments, a provided single-stranded RNAi agent comprises a seed region, in which the pattern of internucleotidic linkages comprises: XOXOX, where X is phosphorothioate and O is phosphodiester.

[0886] In some embodiments, a provided single-stranded RNAi agent comprises a seed region, in which the pattern of internucleotidic linkages comprises: OXOXOX, where X is phosphorothioate and O is phosphodiester.

[0887] In some embodiments, a provided single-stranded RNAi agent comprises a seed region, in which the pattern of internucleotidic linkages comprises: OXOXOXO, where X is phosphorothioate and O is phosphodiester.

[0888] In some embodiments, a provided single-stranded RNAi agent comprises a seed region, in which the pattern of internucleotidic linkages comprises: OXOXO, where X is phosphorothioate and O is phosphodiester.

[0889] In some embodiments, a provided single-stranded RNAi agent comprises a seed region, in which the pattern of internucleotidic linkages comprises: OXOX, where X is phosphorothioate and O is phosphodiester.

[0890] In some embodiments, a provided single-stranded RNAi agent comprises a seed region, in which the pattern of internucleotidic linkages comprises: XXOXOX, where X is phosphorothioate and O is phosphodiester.

[0891] In some embodiments, a provided single-stranded RNAi agent comprises a seed region, in which the pattern of internucleotidic linkages comprises: XXOXOXO, where X is phosphorothioate and O is phosphodiester.

[0892] In some embodiments, a provided single-stranded RNAi agent comprises a seed region, in which the pattern of internucleotidic linkages comprises: XXOXO, where X is phosphorothioate and O is phosphodiester.

[0893] In some embodiments, a provided single-stranded RNAi agent comprises a seed region, in which the pattern of internucleotidic linkages comprises: XXOX, where X is phosphorothioate and O is phosphodiester.

[0894] In some embodiments, a provided single-stranded RNAi agent comprises a seed region, in which the pattern of internucleotidic linkages comprises: OOOOOO, where O is phosphodiester.

[0895] In some embodiments, a provided single-stranded RNAi agent comprises a seed region, in which the pattern of internucleotidic linkages comprises: OOOOO, where O is phosphodiester.

[0896] In some embodiments, a provided single-stranded RNAi agent comprises a seed region, in which the pattern of internucleotidic linkages comprises: OOOO, where O is phosphodiester.

[0897] In some embodiments, a provided single-stranded RNAi agent comprises a seed region, in which the pattern of internucleotidic linkages comprises: SOSOSO, where S is a phosphorothioate in the Sp configuration and O is phosphodiester.

[0898] In some embodiments, a provided single-stranded RNAi agent comprises a seed region, in which the pattern of internucleotidic linkages comprises: SOSOSOS, where S is a phosphorothioate in the Sp configuration and O is phosphodiester.

[0899] In some embodiments, a provided single-stranded RNAi agent comprises a seed region, in which the pattern of internucleotidic linkages comprises: OSOSOS, where S is a phosphorothioate in the Sp configuration and O is phosphodiester.

[0900] In some embodiments, a provided single-stranded RNAi agent comprises a seed region, wherein the seed region comprises a phosphorothioate in the Sp configuration.

[0901] In some embodiments, a provided single-stranded RNAi agent comprises a seed region, wherein the seed region comprises a phosphorothioate in the Sp configuration and a phosphodiester.

[0902] In some embodiments, a provided single-stranded RNAi agent comprises a seed region, in which the pattern of internucleotidic linkages comprises: SOSOS, where S is a phosphorothioate in the Sp configuration and O is phosphodiester.

[0903] In some embodiments, a provided single-stranded RNAi agent comprises a seed region, in which the pattern of internucleotidic linkages comprises: SOSSSS, where S is a phosphorothioate in the Sp configuration and O is phosphodiester.

[0904] In some embodiments, a provided single-stranded RNAi agent comprises a seed region, in which the pattern of internucleotidic linkages comprises: SOSSS, where S is a phosphorothioate in the Sp configuration and O is phosphodiester.

[0905] In some embodiments, a provided single-stranded RNAi agent comprises a seed region, in which the pattern of internucleotidic linkages comprises: SOSS, where S is a phosphorothioate in the Sp configuration and O is phosphodiester.

[0906] In some embodiments, a provided single-stranded RNAi agent comprises a seed region, in which the pattern of internucleotidic linkages comprises the pattern of internucleotidic linkages in the seed region of a first single-stranded RNAi format shown in FIG. 1; and the pattern of 2′ modifications of the nucleotides comprises the pattern of 2′ modifications of the nucleotides in the seed region of a second single-stranded RNAi format shown in FIG. 1.

[0907] In some embodiments, a provided single-stranded RNAi agent comprises a seed region, in which the pattern of internucleotidic linkages comprises the pattern of internucleotidic linkages in the seed region of a first single-stranded RNAi format shown in FIG. 1; and the pattern of 2′ modifications of the nucleotides comprises the pattern of 2′ modifications of the nucleotides in the seed region of the first single-stranded RNAi format shown in FIG. 1.

[0908] Post-seed region of a PNPLA3 oligonucleotide, including a single-stranded RNAi agent

[0909] In some embodiments, a PNPLA3 oligonucleotide, a PNPLA3 oligonucleotide that directs RNA interference, a PNPLA3 oligonucleotide that directs RNase H-mediated knockdown, or a PNPLA3 oligonucleotide that directs both RNA interference and RNase H-mediated knockdown can comprise any post-seed region or portion or structural element thereof described herein or known in the art.

[0910] In some embodiments of a single-stranded RNAi agent, a post-seed region comprises: a sequence of nucleotides comprising at least 1 2′-F modifications. In some embodiments of single-stranded RNAi agent, a post-seed region comprises: a sequence of nucleotides comprising at least 2 to 20 2′-F modifications.

[0911] In some embodiments of a single-stranded RNAi agent, a post-seed region comprises: a sequence of nucleotides comprising at least 1 2′-OMe modifications. In some embodiments of a single-stranded RNAi agent, a post-seed region comprises: a sequence of nucleotides comprising at least 2 to 20 2′-OMe modifications.

[0912] In some embodiments of a single-stranded RNAi agent, a post-seed region comprises: a sequence of nucleotides comprising at least 1 total 2′-OMe and/or 2′-F modifications. In some embodiments of a single-stranded RNAi agent, a post-seed region comprises: a sequence of nucleotides comprising at least 2 to 20 total 2′-OMe and/or 2′-F modifications.

[0913] In some embodiments of a single-stranded RNAi agent, a post-seed region comprises: at least 2 to 10 consecutive pairs of nucleotides having 2′-F and 2′-OMe or 2′-OMe and 2′-F modifications.

[0914] In some embodiments of a single-stranded RNAi agent, a post-seed region comprises a pattern of alternating 2′-modifications, wherein the pattern comprises 2′-F, 2′-OMe, 2′-F, 2′-OMe. In some embodiments of a single-stranded RNAi agent, a post-seed region comprises a pattern of alternating 2′-modifications, wherein the pattern comprises 2′-F, 2′-OMe, 2′-F, 2′-OMe, 2′-F, 2′-OMe. In some embodiments of a single-stranded RNAi agent, a post-seed region comprises a pattern of alternating 2′-modifications, wherein the pattern comprises 2′-F, 2′-OMe, 2′-F, 2′-OMe, 2′-F, 2′-OMe, 2′-F, 2′-OMe. In some embodiments of a single-stranded RNAi agent, a post-seed region comprises a pattern of alternating 2′-modifications, wherein the pattern comprises 2′-F, 2′-OMe, 2′-F, 2′-OMe, 2′-F, 2′-OMe, 2′-F, 2′-OMe, 2′ F, 2′-OMe. In some embodiments of a single-stranded RNAi agent, a post-seed region comprises a pattern of alternating 2′-modifications, wherein the pattern comprises 2′-F, 2′-OMe, 2′-F, 2′-OMe, 2′-F, 2′-OMe, 2′ F, 2′-OMe, 2′-F, 2′-OMe, 2′-F, 2′-OMe. In some embodiments of a single-stranded RNAi agent, a post-seed region comprises a pattern of alternating 2′-modifications, wherein the pattern comprises 2′-F, 2′-OMe, 2′-F, 2′-OMe, 2′-F, 2′-OMe, 2′-F, 2′-OMe, 2′-F, 2′-OMe, 2′-F, 2′-OMe, 2′-F, 2′-OMe. In some embodiments of a single-stranded RNAi agent, a post-seed region comprises a pattern of alternating 2′-modifications, wherein the pattern comprises 2′-F, 2′-OMe, 2′-F, 2′-OMe, 2′-F, 2′-OMe, 2′-F, 2′-OMe, 2′-F, 2′-OMe, 2-F, 2′-OMe, 2′-F, 2′-OMe, 2′-F, 2′-OMe. In some embodiments of a single-stranded RNAi agent, a post-seed region comprises a pattern of alternating 2′-modifications, wherein the pattern comprises 2′-F, 2′-OMe, 2′ F, 2′-OMe, 2′-F, 2′-OMe, 2′-F, 2′-OMe, 2′-F, 2′-OMe, 2′-F, 2′-OMe, 2′-F, 2′-OMe, 2′-F, 2′-OMe, 2′-F, 2′-OMe. In some embodiments of a single-stranded RNAi agent, a post-seed region comprises a pattern of alternating 2′-modifications, wherein the pattern comprise fmfmfmfmfm.

[0915] In some embodiments of a single-stranded RNAi agent, a post-seed region comprises a pattern of alternating 2′-modifications, wherein the pattern comprises mfmf, mfmfmf, mfmfmfmf, mfmfmfmfmf, mfmfmfmfmf, mfmfmfmfmfmf, mfmfmfmfmfmfmf, mfmfmfmfmfmfmfmf, mfmfmfmfmfmfmfmfmf, where m is 2′-OMe and f is 2′-F.

[0916] In some embodiments, each nucleotide in the seed region is 2′-OMe.

[0917] In some embodiments, each nucleotide in the seed region is 2′-OMe, and each nucleotide in the post-seed region is 2′-OMe.

[0918] In some embodiments, one nucleotide in the seed region is 2′-F and each other nucleotide in the seed region is 2′-OMe.

[0919] In some embodiments, one nucleotide in the seed region is 2′-F and each other nucleotide in the seed region is 2′-OMe, and one nucleotide in the post-seed region is 2′-F and each other nucleotide in the post-seed region is 2′-OMe.

[0920] In some embodiments, the nucleotide at position 2 (counting from the 5′-end) is 2′-F and each other nucleotide in the seed region is 2′-OMe, and one nucleotide in the post-seed region is 2′-F and each other nucleotide in the post-seed region is 2′-OMe.

[0921] In some embodiments, the nucleotide at position 2 (counting from the 5′-end) is 2′-F and each other nucleotide in the seed region is 2′-OMe, and the nucleotide at position 14 (counting from the 5′-end) is 2′-F and each other nucleotide in the post-seed region is 2′-OMe.

[0922] Without wishing to be bound by any particular theory, the present disclosure suggests that; in at least some cases, reducing the number of 2′-F nucleotides (e.g, replacing them with 2′-OMe, 2′-deoxy or any other nucleotide which is not 2′-F) can allow in vitro potency, and allow or increase stability, while reducing potential toxicity related to 2′-F.

[0923] In some embodiments, a post-seed region comprises at least 1, 2, 3, 4, 5 6, 7, 8 or 9 phosphorothioates and/or at least 1, 2, 3, 4, 5 6, 7, 8 or 9 phosphodiester internucleotidic linkages.

[0924] In some embodiments of a single-stranded RNAi agent, a post-seed region comprises one or more sets of consecutive phosphorothioates and/or one or more sets of consecutive phosphodiesters.

[0925] In some embodiments, a single-stranded RNAi agent comprises a post-seed region which comprises a span of sugars having a pattern of modifications of any of: mfmfmfmfmfmfm, rnfmfmfmfmfm, mfmfmfmfm, mfmfmfm, mfmfm, mfm, fmfmfmfmfmfm, fmfmfmfmfm, fmfmfmfm, fmfmfm, and fmfm, wherein m is 2′-OMe and f is 2′-F.

[0926] In some embodiments, a single-stranded RNAi agent comprises a post-seed region which comprises a span of sugars having a pattern of modifications of any of: dddfdfdfdfdfd, dddfdfdfdfd, dddfdfdfd, dddfdfd, and dddfd, wherein d is 2′-deoxy and f is 2′-F.

[0927] In some embodiments, a single-stranded RNAi agent comprises a post-seed region which comprises a span of sugars having a pattern of modifications of any of: dfdfdfdfdfdfd, fdfdfdfdfdfd, and fdfdfdfdfd.

[0928] In some embodiments, a single-stranded RNAi agent comprises a post-seed region which comprises a span of sugars having a pattern of modifications of any of: fdfdfdfd, fdfdfd, and fdfd.

[0929] In some embodiments, a single-stranded RNAi agent comprises a post-seed region which comprises a span of internucleotidic linkages having a pattern of any of: XOXOXOXOOOO, OXOXOXOOOO, XOXOXOXOOO, XOXOXOXOO, XOXOXOOOO, OXOXOXOO, XOXOXOOO, OXOXOOOO, OXOXOOO, and XOXOOO, wherein O is phosphodiester and X is a stereorandom phosphorothioate.

[0930] In some embodiments, a single-stranded RNAi agent comprises a post-seed region which comprises a span of internucleotidic linkages having a pattern of OOOOOOO.

[0931] In some embodiments, a single-stranded RNAi agent comprises a post-seed region which comprises a span of internucleotidic linkages having a pattern of any of: OOOOOO, OOOOO, OOOO, and OOO.

[0932] In some embodiments, a single-stranded RNAi agent comprises a post-seed region which comprises a span of internucleotidic linkages having a pattern of any of: OOOOOOOOXXXXXX, OOOOOOOOXXXXX, OOOOOOOOXXXX, OOOOOOOOXXX, OOOOOOOOXXX, OOOOOOOOX, OOOOOOOXXXXXX, OOOOOOXXXXXX, OOOOOXXXXXX, OOOOXXXXXX, OOOXXXXXX, OOXXXXXX, OXXXXXX, OOOOOOX, OOOOOX OOOOX, and OOOX.

[0933] In some embodiments, a single-stranded RNAi agent comprises a post-seed region which comprises a span of internucleotidic linkages having a pattern of any of: OOOOOOOXXXXX, OOOOOOOXXXX, OOOOOOOXXX, OOOOOOXXXXX, OOOOOOXXXX, OOOOOXXXXX, OOOOOXXXX, OOOOOXXX, OOOOXXXX, OOOOXXX, OOOXXXXX, OOOXXXX, and OOOXXX.

[0934] In some embodiments, a single-stranded RNAi agent comprises a post-seed region which comprises at least one chiral internucleotidic linkage. In some embodiments, a single-stranded RNAi agent comprises a post-seed region which comprises at least one chirally controlled internucleotidic linkage. In some embodiments, a single-stranded RNAi agent comprises a post-seed region which comprises at least one chirally controlled internucleotidic linkage which is a phosphorothioate. In some embodiments, a single-stranded RNAi agent comprises a post-seed region which comprises at least one chirally controlled internucleotidic linkage which is a phosphorothioate in the Sp configuration. In some embodiments, a single-stranded RNAi agent comprises a post-seed region which comprises at least one chirally controlled internucleotidic linkage which is a phosphorothioate in the Rp configuration.

[0935] In some embodiments, a single-stranded RNAi agent comprises a post-seed region which comprises a span of internucleotidic linkages having a pattern of any of: OSSSOSSSSSSSSSS, OSSSOSSSSSSSSS, OSSSOSSSSSSSS, OSSSOSSSSSSS, OSSSOSSSSSS, OSSSOSSSSS, OSSSOSSSS, OSSSOSSS, OSSSOSS, OSSSOS, and OSSSO, wherein O is phosphodiester and S is a phosphorothioate in the Sp configuration.

[0936] In some embodiments, a single-stranded RNAi agent comprises a post-seed region which comprises a span of internucleotidic linkages having a pattern of any of: OSOSOSOSSSSSSSS, OSOSOSOSSSSSSS, OSOSOSOSSSSSS, OSOSOSOSSSSS, OSOSOSOSSSS, OSOSOSOSSS, and OSOSOSOSS.

[0937] In some embodiments, a single-stranded RNAi agent comprises a post-seed region which comprises a span of internucleotidic linkages having a pattern of any of: SOSOSOSSSSSSSS, OSOSOSSSSSSSS, SOSOSSSSSSSS, OSOSSSSSSSS, SOSSSSSSSS, and OSSSSSSSS.

[0938] In some embodiments, a single-stranded RNAi agent comprises a post-seed region which comprises a span of internucleotidic linkages having a pattern of any of: SOSOSOSSSSSSSS, SOSOSOSSSSSSS, SOSOSOSSSSSS, SOSOSOSSSSS, SOSOSOSSSS, SOSOSOSSS, SSSSSSSS, SSSSSSS, SSSSSS, SSSSS, SSSS, SSS, and SS.

[0939] In some embodiments, a single-stranded RNAi agent comprises a post-seed region which comprises a span of internucleotidic linkages having a pattern of any of: OSSSSSO, OSSSSS, OSSSS, SSSSSO, SSSSO, and SSSO.

[0940] In some embodiments, a single-stranded RNAi agent comprises a post-seed region which comprises a span of internucleotidic linkages having a pattern of any of: SOSOSOSOSOOOOOOS, SOSOSOSOSOOOOOO, SOSOSOSOSOOOOO, SOSOSOSOSOOOO, SOSOSOSOSOOO, and SOSOSOSOSOO.

[0941] In some embodiments, a single-stranded RNAi agent comprises a post-seed region which comprises a span of internucleotidic linkages having a pattern of any of: OSOSOSOSOOOOOOS, SOSOSOSOOOOOOS, OSOSOSOOOOOOS, SOSOSOOOOOOS, OSOSOOOOOOS, SOSOOOOOOS, and OSOOOOOOS.

[0942] In some embodiments, a single-stranded RNAi agent comprises a post-seed region which comprises a span of internucleotidic linkages having a pattern of any of: XOOOXOOXXXXX, XOOOXOOXXXX, XOOOXOOXXX, XOOOXOOXX, XOOOXOOX, XOOOXOO, OOOXOOXXXXX, OOOOXXXXX, OXOOXXXXX, XOOXXXXX, and OOXXXXX.

[0943] In some embodiments, a single-stranded RNAi agent comprises a post-seed region which comprises a span of internucleotidic linkages having a pattern of any of: XOXOXOXXXXXX, XOXOXOXXXXX, XOXOXOXXXX, XOXOXOXXX, XOXOXOXX, XOXOXOX, OXOXOXXXXXX, XOXOXXXXXX, OXOXXVOCX, XOXXXXXX, and OXXXXXX.

[0944] In some embodiments, a single-stranded RNAi agent comprises a post-seed region which comprises a span of internucleotidic linkages having a pattern of any of: XXXOOOXOXOXXX, XXXOOOXOXOXX, XXXOOOXOXOX, XXXOOOXOXO, XXXOOOXOX, XXXOOOXO, XXOOOXOXOXXX, XOOOXOXOXXX OOOXOXOXXX, OOXOXOXXX, OXOXOXXX, XOXOXXX, XXOOOXOXOXX, XXOOOXOXOX, XOOOXOXOXX, and XOOOXOXOX

[0945] In some embodiments, a single-stranded RNAi agent comprises a post-seed region which comprises a span of internucleotidic linkages having a pattern of any of: XOOOXOXO, XOOOXOX, XOOOXO, OOOXOXO, OOOXOX, and OOOXO.

[0946] In some embodiments, a single-stranded RNAi agent comprises a post-seed region which comprises a span of internucleotidic linkages having a pattern of any of: XOXOOOXOXOXXX, XOXOOOXOXOXX, XOXOOOXOXOX, XOXOOOXOXO, XOXOOOXOX, XOXOOOXO, XOXOOOX, OXOOOXOXOXXX, XOOOXOXOXXX, OOOXOXOXXX, OOXOXOXXX, OXOXOXXX, OXOOOXOXOXX, OXOOOXOXOX, XOOOXOXOXX and XOOOXOXOX.

[0947] In some embodiments, a single-stranded RNAi agent comprises a post-seed region which comprises a span of internucleotidic linkages having a pattern of any of: OOOOOOS, OOOOOSO, OOOOSOO, OOOSOOO, OOSOOOO, OSOOOOO, and SOOOOOO.

[0948] In some embodiments, a hybrid oligonucleotide comprises a (a) seed region capable of annealing to a first complementary target mRNA region; and (b) a post-seed region comprising a 2′-deoxy region, wherein the hybrid oligonucleotide is capable of directing both RNA interference and RNaseH-mediated knockdown, wherein the 2′-deoxy region comprises at least 5 consecutive 2′-deoxy. In some embodiments, the 2′-deoxy can be DNA, or a modified nucleotide, e.g., a modified nucleotide with a 2′-deoxy, wherein the DNA or modified nucleotide comprise a natural sugar and/or a natural base, and/or a modified base, and/or any internucleotidic linkage. In some embodiments, the 2′-deoxy region comprises a stretch of consecutive nucleotides, wherein each nucleotide is 2′-deoxy and each internucleotidic linkage is a phosphorothioate. In some embodiments, the 2′-deoxy region comprises a stretch of consecutive nucleotides of at least 5, 6, 7, 8, 9, 10, 11, 12, 13,14,15, 16, 17, 18, 19, 20 or 21 nucleotides, wherein each nucleotide is 2′-deoxy and each internucleotidic linkage is a phosphorothioate.

[0949] As non-limiting examples of a post-seed region in a single-stranded RNAi agent: Formats 2, 7, 8, 9, 12 and 13 (which each comprise a set of 6 consecutive phosphodiesters; and a set of 6 consecutive phosphodithioates), Format 3 (6 consecutive phosphorodithioates), Formats 4, 5 and 6, Formats 10 and 11; and various other single-stranded RNAi agents disclosed herein.

[0950] In some embodiments of a single-stranded RNAi agent, a post-seed region comprises a mismatch at the most 3′ position.

[0951] In some embodiments, a provided single-stranded RNAi agent can comprise a mismatch at any one or more of: the 5′ position, either or both of the 3′-terminal dinucleotide, and the most 3′ position of the region between the seed region and the 3′-end region.

[0952] In some embodiments, a PNPLA3 oligonucleotide, a PNPLA3 oligonucleotide that directs RNA interference, a PNPLA3 oligonucleotide that directs RNase H-mediated knockdown, or a PNPLA3 oligonucleotide that directs both RNA interference and RNase H-mediated knockdown can comprise any post-seed region or portion or structural element thereof described herein or known in the art.

[0953] 3′-End Region of a PNPLA3 Oligonucleotide, Including a Single-Stranded RNAi Agent

[0954] In some embodiments, provided oligonucleotides are capable of directing a decrease in the expression and/or level of a target gene or its gene product, in some embodiments, provided oligonucleotides are capable of directing a decrease in the expression and/or level of a target gene or its gene product via RNA interference, in some embodiments, provided oligonucleotides are capable of directing a decrease in the expression and/or level of a target gene or its gene product via a biochemical mechanism which does not involve RNA interference or RISC (including, but not limited to, RNaseH-mediated knockdown or steric hindrance of gene expression). In some embodiments, provided oligonucleotides are capable of directing a decrease in the expression and/or level of a target gene or its gene product via RNA interference and/or RNaseH-mediated knockdown. In some embodiments, provided oligonucleotides are capable of directing a decrease in the expression and/or level of a target gene or its gene product by sterically blocking translation after annealing to a target gene mRNA, and/or by altering or interfering with mRNA splicing and/or exon inclusion or exclusion. In some embodiments, provided oligonucleotides can comprise any 3′-end region described herein or known in the art.

[0955] In some embodiments, the 3′-end region of a PNPLA3 oligonucleotide is such that the oligonucleotide is capable of directing a decrease in the expression and/or level of a target gene or its gene product.

[0956] In some embodiments, the 3′-end region of a RNAi agent is such that the RNAi agent is capable of directing RNA interference of a specific target transcript in a sequence-specific manner.

[0957] In some embodiments, a PNPLA3 oligonucleotide, a PNPLA3 oligonucleotide that directs RNA interference, a PNPLA3 oligonucleotide that directs RNase H-mediated knockdown, or a PNPLA3 oligonucleotide that directs both RNA interference and RNaseH-mediated knockdown can comprise any 3′-end region and/or 3′-terminal dinucleotide and/or 3′-end cap described herein or known in the art. In some embodiments, a 3′-end region can comprise a GaINAc moiety. In some embodiments, a GaINAc moiety is any GalNAc, or variant, derivative or modification thereof, as described herein or known in the art.

[0958] In some embodiments, a 3′-end region and/or 3′-terminal dinucleotide and/or 3′-end cap performs two functions: (a) decreasing the sensitivity of the oligonucleotide to exo- and/or endonucleases; and (b) allowing the function of the oligonucleotide, wherein the function is directing RNA interference, directing RNase H-mediated knockdown, or directing both RNA interference and RNase H-mediated knockdown.

[0959] Thus, the 3′-end region of the single-stranded RNAi agent can comprise a 3′-terminal dinucleotide and/or a 3′-end cap.

[0960] In a mammalian cell, Dicer reportedly processes double-stranded RNA (dsRNA) into 19-23 base pair siRNAs, which comprise a double-stranded region, with each strand terminating in a single-stranded 3′ overhang, which can be 1 to 4 nt long, but is typically a 3′-terminal dinucleotide. Bernstein et al. 2001 Nature 409: 363; Elbashir et al. 2001 Nature 411: 494-498; Elbashir et al. 2001 EMBO J. 20: 6877. The two dinucleotide overhangs reportedly do not contribute to target specificity. They do, however, reportedly help protect the ends of the siRNA from nuclease degradation and sometimes improve activity. Elbashir et al. 2001 Nature 411: 494.498; Elbashir et al. 2001 EMBO J. 20: 6877-6888; and Kraynack et al. 2006 RNA 12:163476. Thus, it is reportedly not necessary for a functional double-stranded RNAi agent for a 3′-terminal dinucleotide to comprise a sequence complementary to the target gene sequence.

[0961] In artificial double-stranded RNAi agents, the 3′ single-stranded dinucleotide overhangs have reportedly been experimentally replaced with various moieties, including other single-stranded dinucleotides, nucleotides, and 3′-end caps. The 3′-terminal dinucleotides of a 21-mer are reportedly often replaced by an artificial dinucleotide, such as UU, TT, dTdT, sdT, dTTdT, sdTsdT, or sdTdT. Replacing up to four nucleotides on each end of the siRNA with deoxyribonucleotides has reportedly been well tolerated, whereas complete substitution with deoxyribonucleotides results in no RNAi activity. International PCT Publication No. WO 00/44914, and Beach et al. International PCT Publication No. WO 01/68836 preliminarily reported that siRNA may include modifications to either the phosphate-sugar backbone or the nucleoside to include at least one of a nitrogen or sulfur heteroatom. Kreutzer et al. Canadian Patent Application No. 2,359,180, also report certain chemical modifications for use in dsRNA constructs in order to counteract activation of double-stranded RNA-dependent protein kinase PKR, specifically 2′-amino or 2 —O-methyl nucleotides, and nucleotides containing a 2′-O or 4′-C methylene bridge. Additional 3′-terminal nucleotide overhangs include dT (deoxythimidine), 2′-O,4′-C-ethylene thy midine (eT), and 2-hydroxyethyl phosphate (hp). Other artificial 3′ overhangs (3′-terminal dinucleotides) include dinucleotides of sequences AA, CC, GG, and UG. Elbashir et al. 2001 EMBO J. 20: 6877-6888. In some embodiments, a 3′-terminal dinucleotide reportedly is AA.

[0962] Alternatively, in a double-stranded RNAi agent, one or both of the 3′-terminal dinucleotides can reportedly be deleted (and not replaced), leaving a functional siRNA comprising two 19-nt strands forming a 19-bp blunt-ended duplex. Deleting and not replacing the 3′-terminal dinucleotide in a double-stranded RNAi agent reportedly leaves the ends of the strands vulnerable to nucleases; to compensate for this, an artificial 3′-end cap can be added. The 3′-end caps are reportedly non-nucleotidic; they are not nucleotides as they do not comprise all components of a nucleotide (phosphate, sugar and base). The dinucleotide overhangs in a double-stranded RNAi agent can reportedly sometimes functionally be replaced by a 3′-end cap, leaving a blunt-ended 19-bp duplex with one or two 3′-end caps, which can protect the molecule from nucleases. In general, a 3-end cap reportedly must not prevent RNA interference mediated by the RNAi agent; many 3′-end caps also impart an added advantage, such as increased RNAi activity and/or stability against nucleases.

[0963] Without wishing to be bound by any particular theory, the present application notes that in at least some cases, previously-described 3′-end caps reportedly are theorized to interact with a PAZ domain. In some embodiments, a 3′-end cap is reportedly a PAZ ligand. WO 2015/051366. Reportedly, Dicer is an RNase 111 enzyme and is composed of six recognizable domains. Reportedly, at or near the N-terminus is an approx. 550 aa DExH-box RNA helicase domain, which is immediately followed by a conserved approx. 100 aa domain called DUF283; just C-terminal to DUF283 domain is the PAZ (for. Piwi/Argonaute/Zwille) domain, which recognizes single stranded dinucleotide overhangs. Myers et al 2005, in RNA interference Technology, ed. Appasani, Cambridge University Press, Cambridge UK, p. 29-54; Bernstein et al. 2001 Nature 409: 363-366; and Schauer et al. 2002 Trends Plant Sci. 7: 487-491; Lingel et al. 2003 Nature 426: 465-469; Song et al. 2003 Nature Struct. Biol. 10: 1026-1032; Yan et al. 2003 Nature 426: 468474; Lingel et al. 2004 Nature Struct. Mol. Biol. 1 1: 576-577; Ma et al. 2004 Nature 429: 318-322. Reportedly, the PAZ domain in Dicer could also bind RNA to position the catalytic domains for cleavage. Zhang et al. 2004 Cell 1 18: 57-68. In some embodiments, a 3′-end cap is a PAZ ligand which interacts with a PAZ domain.

[0964] In some embodiments, a 3′-end cap can allow two functions: (1) allowing RNA interference; and (2) increasing duration of activity and/or biological half-life, which may be accomplished, for example, by increased binding to the PAZ domain of Dicer and/or reducing or preventing degradation of the RNAi agent (e.g., by nucleases such as those in the serum or intestinal fluid).

[0965] Various 3′-terminal dinucleotide are described in the oligonucleotides listed in Table 1A.

[0966] In some embodiments, a provided single-stranded RNAi agent comprises a pair of 3′-terminal nucleotides. The penultimate nucleotide is 2′-OMe and the 5′ nucleotide is 2′-OMe.

[0967] In some embodiments, a provided single-stranded RNAi agent comprises a pair of 3′-terminal nucleotides and the penultimate nucleotide is 2′-deoxy and the 5′ nucleotide is 2′-OMe. Non-limiting examples of single-stranded RNAi agents disclosed herein of this structure include: Formats 10, 11, 13 and 14, FIG. 1; and various other single-stranded RNAi agents disclosed herein.

[0968] In some embodiments, a provided single-stranded RNAi agent comprises a pair of 3′-terminal nucleotides and the penultimate nucleotide is 2′-deoxy and the 5′ nucleotide is 2′-OMe, and wherein the penultimate nucleotide comprises a linker.

[0969] In some embodiments, a provided single-stranded RNAi agent comprises a pair of 3′-terminal nucleotides and wherein the penultimate nucleotide comprises a linker.

[0970] In some embodiments, a provided single-stranded RNAi agent comprises a pair of 3′-terminal nucleotides and the penultimate nucleotide is 2′-deoxy and the 5′ nucleotide is 2′-OMe, and wherein the penultimate nucleotide comprises a linkerconjugated to an additional chemical moiety.

[0971] In some embodiments, a provided single-stranded RNAi agent comprises a pair of 3′-terminal nucleotides and the penultimate nucleotide is 2′-deoxy T and the 5′ nucleotide is 2′-OMe U, and wherein the penultimate nucleotide comprises a linker conjugated to an additional chemical moiety.

[0972] In some embodiments, a provided single-stranded RNAi agent comprises a pair of 3′-terminal nucleotides and wherein the penultimate nucleotide comprises a linkerconjugated to an additional chemical moiety selected from: a targeting moiety, a lipid moiety, a carbohydrate moiety, a bicyclic ketal, and a GalNAc moiety.

[0973] In some embodiments, a provided single-stranded RNAi agent comprises a pair of 3′-terminal nucleotides and the penultimate nucleotide is 2′-deoxy and the 5′ nucleotide is 2′-OMe, and wherein the penultimate nucleotide comprises a linkerconjugated to an additional chemical moiety selected from: a targeting moiety, a lipid moiety, a carbohydrate moiety, a bicyclic ketal, and a GalNAc moiety.

[0974] In some embodiments, a provided single-stranded RNAi agent comprises a pair of 3′-terminal nucleotides and the penultimate nucleotide is 2′-deoxy T and the 5′ nucleotide is 2′-OMe U, and wherein the penultimate nucleotide comprises a linkerconjugated to an additional chemical moiety selected from: a targeting moiety, a lipid moiety, a carbohydrate moiety, a bicyclic ketal, and a GalNAc moiety.

[0975] In some embodiments, a 3′-end region or 3′-end cap comprises a GN3, or any other suitable RNAi agent 3′-end region compound as described in, for example, Allerson et al. 2005 J. Med. Chem. 48: 901-04; Lima et al. 2012 Cell 150: 883-894; Prakash et al. 2015 Nucl. Acids Res. 43: 2993-3011; and/or Prakash et al. 2016 Bioorg. Med. Chem. Lett. 26: 26: 2817-2820.

[0976] Various 3′-end caps have been described in the literature.

[0977] Generally, a 3′-end cap is joined to the 3′-terminal internucleotidic linkage. The 3′-terminal internucleotidic linkage can be selected from: a phosphodiester, a phosphorothioate, a phosphodithioate, and any internucleotidic linkage described herein.

[0978] A3′-endcap for a provided single-stranded RNAi agent can be selected from, for example, any 3′-end cap described herein.

[0979] In some embodiments, a 3′-end cap is selected from: 2′,3′-cyclic phosphate, C3 (or C6, C7, C12) amino linker, thiol linker, carboxyl linker, non-nucleotidic spacers (C3, C6, C9, C12, abasic, triethylene glycol, hexaethylene glycol), biotin, and fluoresceine.

[0980] In some embodiments, a 3′-end cap is selected from any 3′-end cap described in WO 2015/051366, including but not limited to C3, amino C3, C6, C8, C10, and C12. In some embodiments, a 3′-end cap is selected from: Triethylene glycol, Cyclohexyl. (or Cyclohex), Phenyl, BP (Biphenyl), Adamantane and Lithocholic acid (or Lithochol), as described in U.S. Pat. Nos. 8,097,716; 8,084,600; 8,344,128; 8,404,831; and 8,404,832.

[0981] Various functional 3′-end caps suitable for a provided RNAi agent are described in, for example, EP 1520022 B1; U.S. Pat. Nos. 8,097,716, 8,084,600; 8,404,831; 8,404,832, and 8,344,128; and WO 2015/051366.

[0982] In addition, the present disclosure notes that disclosed herein are various 5′-end structures and 3′-end regions, and combinations thereof, which function in single-stranded RNAi agents. However, it is noted, in contrast, many 5′-end structures and 3′-end caps, and combinations thereof, have previously been reported to reduce or eliminate the RNA interference ability of various double-stranded RNAi agents. See, for example, Czauderna et al. 2003 Nucl. Acids Res. 31:2705-2716; Hadwiger et al. 2005, pages 194-206, in RNA interference Technology, ed. K. Appasani, Cambridge University Press, Cambridge, UK; Deleavey et al. 2009 Curr. Prot. Nucl. Acid Chem. 16.3.1-16.3.22; Terrazas et al. 2009 Nucleic Acids Res. 37: 346-353; Harboth et al. 2003 AntisenseNucl. Acid Drug Dev 13: 83-105; Song et al. 2003 Nature Med. 9: 347-351; U.S. Pat. No. 5,998,203; Lipardi et al. 2001 Cell 107: 299-307; Schwarz et al. 2002 Mot Cell 10: 537-548; and WO 2015/051366.

[0983] a bicyclic ketal, Additional optional structural elements of a PNPLA3 oligonucleotide

[0984] In some embodiments, a PNPLA3 oligonucleotide, a PNPLA3 oligonucleotide capable of directing a decrease in the expression and/or level of a target gene or its gene product can comprise any structural element or patter thereof described herein or known in the art.

[0985] a bicyclic ketal, Optional additional chemical moiety conjugated to a PNPLA3 oligonucleotide

[0986] In some embodiments, provided oligonucleotides are capable of directing a decrease in the expression and/or level of a target gene or its gene product. In some embodiments, provided oligonucleotides are capable of directing a decrease in the expression and/or level of a target gene or its gene product via RNA interference. In some embodiments, provided oligonucleotides are capable of directing a decrease in the expression and/or level of a target gene or its gene product via a biochemical mechanism which does not involve RNA interference or RISC (including, but not limited to, RNaseH-mediated knockdown or steric hindrance of gene expression). In some embodiments, provided oligonucleotides are capable of directing a decrease in the expression and/or level of a target gene or its gene product via RNA interference and/or RNaseH-mediated knockdown. In some embodiments, provided oligonucleotides are capable of directing a decrease in the expression and/or level of a target gene or its gene product by sterically blocking translation after annealing to a target gene mRNA, and/or by altering or interfering with mRNA splicing and/or exon inclusion or exclusion. In some embodiments, provided oligonucleotides can comprise any optional additional chemical moiety, including but not limited to, a targeting moiety, a lipid moiety, a carbohydrate moiety, a bicyclic ketal, a GaINAc moiety, etc., described herein or known in the art.

[0987] In some embodiments, a PNPLA3 oligonucleotide, a PNPLA3 oligonucleotide that is capable of directing a decrease in the expression and/or level of a target gene or its gene product can comprise any optional additional chemical moiety, including but not limited to, a targeting moiety, a lipid moiety, a carbohydrate moiety, a bicyclic ketal, a GalNAc moiety, etc., described herein or known in the art.

[0988] In some embodiments, a PNPLA3 oligonucleotide, a PNPLA3 oligonucleotide that directs RNA interference, a PNPLA3 oligonucleotide that directs RNase H-mediated knockdown, or a PNPLA3 oligonucleotide that directs both RNA interference and RNase H-mediated knockdown can comprise any optional additional chemical moiety, including but not limited to, a targeting moiety, a lipid moiety, a carbohydrate moiety, a bicyclic ketal, a GalNAc moiety, etc., described herein or known in the art.

[0989] In some embodiments, an additional chemical moiety is conjugated to single-stranded RNAi agent.

[0990] Optional additional chemical moiety conjugated to a PNPLA3 oligonucleotide: A targeting moiety

[0991] In some embodiments, a provided oligonucleotide composition further comprises a targeting moiety (e.g., a targeting compound agent, ligand, or component). A targeting moiety can be either conjugated or not conjugated to a lipid or a PNPLA3 oligonucleotide or single-stranded RNAi agent. In some embodiments, a targeting moiety is conjugated to a PNPLA3 oligonucleotide or single-stranded RNAi agent. In some embodiments, a PNPLA3 oligonucleotide or single-stranded RNAi agent is conjugated to both a lipid and a targeting moiety. As described in here, in some embodiments, a PNPLA3 oligonucleotide or single-stranded RNAi agent is a provided oligonucleotide. Thus, in some embodiments, a provided oligonucleotide composition further comprises, besides a lipid and oligonucleotides, a target elements. Various targeting moieties can be used in accordance with the present disclosure, e.g., lipids, antibodies, peptides, carbohydrates, etc.

[0992] Targeting moieties can be incorporated into provided technologies through many types of methods in accordance with the present disclosure. In some embodiments, targeting moieties are physically mixed with provided oligonucleotides to form provided compositions. In some embodiments, targeting moieties are chemically conjugated with oligonucleotides.

[0993] In some embodiments, provided compositions comprise two or more targeting moieties. In some embodiments, provided oligonucleotides comprise two or more conjugated targeting moieties. In some embodiments, the two or more conjugated targeting moieties are the same, in some embodiments, the two or more conjugated targeting moieties are different, in some embodiments, provided oligonucleotides comprise no more than one target component. In some embodiments, oligonucleotides of a provided composition comprise different types of conjugated targeting moieties. In some embodiments, oligonucleotides of a provided composition comprise the same type of targeting moieties.

[0994] In some embodiments, provided compositions comprise two or more targeting moieties, in some embodiments, provided oligonucleotides capable of directing single-stranded RNA interference comprise two or more conjugated targeting moieties. In some embodiments, the two or more conjugated targeting moieties are the same. In some embodiments, the two or more conjugated targeting moieties are different. In some embodiments, provided oligonucleotides capable of directing single-stranded RNA interference comprise no more than one target component. In some embodiments, oligonucleotides of a provided composition comprise different types of conjugated targeting moieties. In some embodiments, oligonucleotides of a provided composition comprise the same type of targeting moieties.

[0995] Targeting moieties can be conjugated to oligonucleotides optionally through linkers. Various types of linkers in the art can be utilized in accordance of the present disclosure. In some embodiments, a linker comprise a phosphate group, which can, for example, be used for conjugating targeting moieties through chemistry similar to those employed in oligonucleotide synthesis. In some embodiments, a linker comprises an amide, ester, or ether group. In some embodiments, a linker has the structure of -L-. Targeting moieties can be conjugated through either the same or different linkers compared to lipids.

[0996] Targeting moieties, optionally through linkers, can be conjugated to oligonucleotides at various suitable locations. In some embodiments, targeting moieties are conjugated through the 5′-OH group. In some embodiments, targeting moieties are conjugated through the 3′-OH group. In some embodiments, targeting moieties are conjugated through one or more sugar moieties. In some embodiments, targeting moieties are conjugated through one or more bases. In some embodiments, targeting moieties are incorporated through one or more internucleotidic linkages. In some embodiments, a PNPLA3 oligonucleotide may contain multiple conjugated targeting moieties which are independently conjugated through its 5′-OH, 3′-OH, sugar moieties, base moieties and/or internucleotidic linkages. Targeting moieties and lipids can be conjugated either at the same, neighboring and/or separated locations. In some embodiments, a target component is conjugated at one end of a PNPLA3 oligonucleotide, and a lipid is conjugated at the other end.

[0997] In some embodiments, a provided composition further comprises a targeting component or moiety. A targeting component can be either incorporated into (targeting moiety) or not incorporated into a PNPLA3 oligonucleotide. In some embodiments, a targeting component is a lipid. In some embodiments, a targeting component is a carbohydrate or a bicyclic ketal. In some embodiments, a targeting component is —R^{LD} as described in the present disclosure. In some embodiments, a targeting component is —R^{CD} as described in the present disclosure.

[0998] Targeting components can be incorporated into provided technologies through many types of methods in accordance with the present disclosure, for example, those described for lipids and carbohydrates. In some embodiments, targeting components are physically mixed with provided oligonucleotides to form provided compositions. In some embodiments, targeting components are chemically conjugated with oligonucleotide moieties.

[0999] In some embodiments, provided compositions comprise two or more targeting components. In some embodiments, provided oligonucleotides comprise two or more conjugated targeting components. In some embodiments, the two or more conjugated targeting components are the same, in some embodiments, the two or more conjugated targeting components are different. In some embodiments, provided oligonucleotides comprise no more than one targeting component. In some embodiments, oligonucleotides of a provided composition comprise different types of conjugated targeting components. In some embodiments, oligonucleotides of a provided composition comprise the same type of targeting components.

[1000] Targeting components can be conjugated to oligonucleotides optionally through linkers, for example, as described for lipids and carbohydrates. Various types of linkers in the art can be utilized in accordance of the present disclosure. In some embodiments, a linker comprise a phosphate group, which can, for example, be used for conjugating targeting components through chemistry similar to those employed in oligonucleotide synthesis. In some embodiments, a linker comprises an amide, ester, or ether group. In some embodiments, a linker has the structure of -L-. Targeting components can be conjugated through either the same or different linkers compared to lipids.

[1001] Targeting components, optionally through linkers, can be conjugated to oligonucleotides at various suitable locations, in some embodiments, targeting components are conjugated through the 5′-OH group. In some embodiments, targeting components are conjugated through the 3′-OH group. In some embodiments, targeting components are conjugated through one or more sugar moieties. In some embodiments, targeting components are conjugated through one or more bases. In some embodiments, targeting components are incorporated through one or more internucleotidic linkages. In some embodiments, a PNPLA3 oligonucleotide may contain multiple conjugated targeting components which are independently conjugated through its 5′-OH, 3′-OH, sugar moieties, base moieties and/or internucleotidic linkages. Targeting components and lipids can be conjugated either at the same, neighboring and/or separated locations. In some embodiments, a targeting component is conjugated at one end of a PNPLA3 oligonucleotide, and a lipid is conjugated at the other end.

[1002] In some embodiments, a targeting component interacts with a protein on the surface of targeted cells. In some embodiments, such interaction facilitates internalization into targeted cells. In some embodiments, a targeting component comprises a sugar moiety. In some embodiments, a targeting component comprises a poly peptide moiety. In some embodiments, a targeting component comprises an antibody. In some embodiments, a targeting component is an antibody. In some embodiments, a targeting component comprises an inhibitor. In some embodiments, a targeting component is a moiety from a small molecule inhibitor. In some embodiments, an inhibitor is an inhibitor of a protein on the surface of targeted cells. In some embodiments, an inhibitor is a carbonic anhydrase inhibitor. In some embodiments, an inhibitor is a carbonic anhydrase inhibitor expressed on the surface of target cells. In some embodiments, a carbonic anhydrase is I, II, III, IV, V, VI, VII, VIII, IX, X, XI, XII, XIII, XIV, XV or XVI. In some embodiments, a carbonic anhydrase is membrane bound. In some embodiments, a carbonic anhydrase is IV, IX, XII or XIV. In some embodiments, an inhibitor is for IV, IX, XII and/or XIV. In some embodiments, an inhibitor is a carbonic anhydrase III inhibitor. In some embodiments, an inhibitor is a carbonic anhydrase TV inhibitor. In some embodiments, an inhibitor is a carbonic anhydrase IX inhibitor. In some embodiments, an inhibitor is a carbonic anhydrase XII inhibitor. In some embodiments, an inhibitor is a carbonic anhydrase XIV inhibitor. In some embodiments, an inhibitor comprises or is a sulfonamide (e.g., those described in Supuran, CT. Nature Rev Drug Discover 2008, 7, 168-181, which sulfonamides are incorporated herein by reference). In some embodiments, an inhibitor is a sulfonamide. In some embodiments, targeted cells are muscle cells.

[1003] In some embodiments, a targeting component is R^{TD}, wherein R^{TD} is R^{TD}, or R^{CD} as described in the present disclosure.

[1004] In some embodiments, a targeting component is R^{LD} as defined and described in the present disclosure. In some embodiments, the present disclosure provides oligonucleotides comprising R^{LD}. In some embodiments, the present disclosure provides oligonucleotide compositions comprising oligonucleotides comprising R^{LD}. In some embodiments, the present disclosure provides oligonucleotide compositions comprising a first plurality of oligonucleotides comprising R^{LD}. In some embodiments, the present disclosure provides chirally controlled oligonucleotide compositions of oligonucleotides comprising R^{LD}.

[1005] In some embodiments, a targeting component is R^{CD} as defined and described in the present disclosure. In some embodiments, the present disclosure provides oligonucleotides comprising R^{CD}. In some embodiments, the present disclosure provides oligonucleotide compositions comprising oligonucleotides comprising R^{CD}. In some embodiments, the present disclosure provides oligonucleotide compositions comprising a first plurality of oligonucleotides comprising R-D. In some embodiments, the present disclosure provides chirally controlled oligonucleotide compositions of oligonucleotides comprising R^{CD}.

[1006] In some embodiments, R^{TD} comprises or is

[chemical structure]

In some embodiments, R^{TD} comprises or is

[chemical structure]

In some embodiments, R^{TD} comprises or is

[chemical structure]

In some embodiments, R^{TD} comprises or is

[chemical structure]

In some embodiments, R^{TD} comprises or is

[chemical structure]

In some embodiments, R^{TD} comprises or is

[chemical structure]

In some embodiments. R^{TD} comprises or is

[chemical structure]

In some embodiments, R^{TD} comprises or is

[chemical structure]

In some embodiments, R^{TD} comprises or is

[chemical structure]

In some embodiments. R^{TD} comprises or is

[chemical structure]

In some embodiments. R^{TD} comprises or is

[chemical structure]

In some embodiments, R^{TD} comprises or is

[chemical structure]

In some embodiments, R^{TD} comprises or is

[chemical structure]

In some embodiments, R^{TD} comprises or is

[chemical structure]

In some embodiments, R^{TD} comprises or is

[chemical structure]

embodiments, R^{TD} is a targeting component that comprises or is a lipid moiety. In some embodiments, X is O. In some embodiments, X is S.

[1007] In some embodiments, the present disclosure provides technologies (e.g., reagents, methods, etc.) for conjugating various moieties to oligonucleotide moieties. In some embodiments, the present disclosure provides technologies for conjugating targeting component to oligonucleotide moieties. In some embodiments, the present disclosure provides acids comprising targeting components for conjugation, e.g., R^{LD}—COOH. In some embodiments, the present disclosure provides linkers for conjugation, e.g., L^{M}. A person having ordinary skill in the art understands that many known and widely practiced technologies can be utilized for conjugation with oligonucleotide moieties in accordance with the present disclosure. In some embodiments, a provided acid is

[chemical structure]

In some embodiments, a provided acid is

[chemical structure]

In some embodiments, a provided acid is

[chemical structure]

In some embodiments, a provided acid is

[chemical structure]

In some embodiments a provided acid is a fatty acid, which can provide a lipid moiety as a targeting component. In some embodiments, the present disclosure provides methods and reagents for preparing such acids.

[1008] In some embodiments, a targeting moiety is a lipid moiety, e.g., moiety of cholesterol or derivatives thereof (R^{TD}—H is an optionally substituted cholesterol or derivatives thereof).

[1009] In some embodiments, a targeting moiety is a peptide, in some embodiments, a targeting moiety is protein or a domain thereof. In some embodiments, a targeting moiety is antibody or a portion thereof.

[1010] Optional additional chemical moieties conjugated to a PNPLA3 oligonucleotide: a lipid moiety

[1011] In some embodiments, provided oligonucleotides or oligonucleotide compositions further comprise one or more lipids or lipid moieties. In some embodiments, a lipid is a lipid moiety, in some embodiments, a lipid moiety is or comprises a lipid which is conjugated directly or indirectly to a PNPLA3 oligonucleotide. In some embodiments, lipid conjugation can achieve one or more unexpected, greatly improved properties (e.g., activities, toxicities, distribution, pharmacokinetics, etc.). As appreciated by a person having ordinary skill in the art, various carbohydrate moieties are described in the literature and can be utilized in accordance with the present disclosure.

[1012] Lipid moieties can be incorporated into oligonucleotides at various locations, for example, sugar units, internucleotidic linkage units, nucleobase units, etc., optionally through one or more bivalent or multivalent linkers (which can be used to connect two or more carbohydrate moieties to oligonucleotides). In some embodiments, the present disclosure provides technologies for lipid incorporation into oligonucleotides. In some embodiments, the present disclosure provides technologies for incorporating lipid moieties, optionally through one or more linkers, at nucleobase units, as an alternative and/or addition to incorporation at internucleotidic linkages and/or sugar units, thereby providing enormous flexibility and/or improved properties and/or activities. In some embodiments, a provided oligonucleotide comprises at least one lipid moiety, optionally through a linker, incorporated into the oligonucleotide at a nucleobase unit.

[1013] In some embodiments, provided oligonucleotides have the structure of:

A^{c}-[-L^{M}-(R^{D})ₐ]_{b}, or [(A^{c})ₐ-L]_{b}—R^{D},

wherein:
[1014] A^{c} is a PNPLA3 oligonucleotide chain ([H]_{b}-A^{c} is a PNPLA3 oligonucleotide);
[1015] a is 1-1000;
[1016] b is 1-1000;
[1017] each L^{M} is independently a linker; and
[1018] each R^{D} is independently R^{LD} or R^{CD},
[1019] Rep is an optionally substituted, linear or branched group selected from a C₁₋₁₀₀ aliphatic group and a C₁₋₁₀₀ heteroaliphatic group having 1-30 heteroatoms independently selected from oxygen, nitrogen, sulfur, phosphorus, boron and silicon, wherein one or more methylene units are optionally and independently replaced with C₁₋₆ alkylene, C₁-6 alkenylene, —C≡C—, —C(R′)₂—, —O—, —S—, —S—S—, —N(R′)—, —C(O)—, —C(S)—, —C(NR′)—, —C(O)N(R′)—, —N(R′)C(O)N(R′)—, —N(R′)C(O)O—, —S(O)—, —S(O)₂—, —S(O)₂N(R′)—, —C(O)S—, —C(O)O—, —P(O)(OR′)—, —P(O)(SR′)—, —P(O)(R′)—, —P(O)(NR′)—, —P(S)(OR′)—, —P(S)(SR′)—, —P(S)(R′)—, —P(S)(NR′)—, —P(R′)—, —P(OR′)—, —P(SR′)—, —P(NR′)—, —P(OR′)[B(R′)₃]—, —OP(O)(OR′)O—, —OP(O)(SR′)O—, —OP(O)(R′)O—, —OP(O)(NR′)O—, —OP(OR′)O—, —OP(SR′)O—, —OP(NR′)O—, —OP(R′)O—, or —OP(OR′)[B(R′)₃]O—; and one or more carbon atoms are optionally and independently replaced with Cy;
[1020] R^{LD} is an optionally substituted, linear or branched group selected from a C₁₋₁₀₀, aliphatic group wherein one or more methylene units are optionally and independently replaced with C₁₋₆ alkylene, alkenylene, —C≡C—, —C(R′)₂—, —O—, —S—, —S—S—, —N(R′)—, —C(O)—, —C(S)—, —C(NR′)—, —C(O)N(R′)—, —N(R′)C(O)N(R′)—, —N(R′)C(O)O—, —S(O)—, —S(O)₂—, —S(O)₂N(R′)—, —C(O)S—, —C(O)O—, —P(O)(OR′)—, —P(O)(SR′)—, —P(O)(R′)—, —P(O)(NR′)—, —P(S)(OR′)—, —P(S)(SR′)—, —P(S)(R′)—, —P(S)(NR′)—, —P(R′)—, —P(OR′)—, —P(SR′)—, —P(NR′)—, —P(OR′)[B(R′)₃]—, —OP(O)(OR′)O—, —OP(O)(SR′)O—, —OP(O)(R′)O—, —OP(O)(NR′)O—, —OP(OR′)O—, —OP(SR′)O—, —OP(NR′)O—, —OP(R′)O—, or —OP(OR′)[B(R′)₃]O—; and one or more carbon atoms are optionally and independently replaced with Cy;
[1021] L^{M} is a covalent bond, or a bivalent or multivalent, optionally substituted, linear or branched group selected from a C₁₋₁₀₀ aliphatic group and a C₁₋₁₀₀ heteroaliphatic group having 1-30 heteroatoms independently selected from oxygen, nitrogen, sulfur, phosphorus, boron and silicon, wherein one or more methylene units are optionally and independently replaced with C₁₋₆ alkylene, C₁₋₆; alkenylene, —C≡C—, —C(R′)₂—, —O—, —S—, —S—S—, —N(R′)—, —C(O)—, —C(S)—, —C(NR′)—, —C(O)N(R′)—, —N(R′)C(O)O—, —S(O)—, —S(O)₂—, —S(O)₂N(R′), —C(O)S—, —C(O)O—P(O)(OR′)—, —P(O)(SR′)—, —P(O)(R′)—, —P(O)(NR′)—, —P(S)(OR′)—, —P(S)(SR′)—, —P(S)(R′)—, —P(OR′)—, —P(SR′)—, —P(NR′)—, —P(OR′)[B(R′)₃]—, —OP(O)(OR′)O—, —OP(O)(SR′)O—, —OP(O)(R′)O—, —OP(O)(NR′)O—, —OP(OR′)O—, —OP(SR′)O—, —OP(NR′)O—, —OP(R′)O—, or —OP(OR′)[B(R′)₃]O—; and one or more carbon atoms are optionally and independently replaced with Cy^{L};
[1022] Cy^{L} is an optionally substituted tetravalent group selected from a C₃₋₂₀ cydoaliphatic ring, a C₆₋₂₀ aryl ring, a 5-20 membered heteroacyl ring having 1-10 heteroatoms independently selected from oxygen, nitrogen, sulfur, phosphorus and silicon, and a 3-20 membered heterocyclyl ring having 1-10 heteroatoms independently selected from oxygen, nitrogen, sulfur, phosphorus, boron and silicon;
[1023] each R′ is independently —R, —C(O)R, —C(O)OR, or—S(O)₂R; and
[1024] each R is independently —H, or an optionally substituted group selected from C₁₋₃₀ aliphatic, C₁₋₃₀ heteroaliphatic having 1-10 heteroatoms independently selected from oxygen, nitrogen, sulfur, phosphorus and silicon, C₆₋₃₀ aryl, C₆₋₃₀ arylaliphatic, C₆₋₃₀ arylheteroaliphatic having 1-10 heteroatoms independently selected from oxygen, nitrogen, sulfur, phosphorus and silicon, 5-30 membered heteroaryl having 1-10 heteroatoms independently selected from oxygen, nitrogen, sulfur, phosphorus and silicon, and 3-30 membered heterocyclyl having 1-10 heteroatoms independently selected from oxygen, nitrogen, sulfur, phosphorus and silicon, or
[1025] two R groups are optionally and independently taken together to form a covalent bond, or:
[1026] two or more R groups on the same atom are optionally and independently taken together with the atom to form an optionally substituted, 3-30 membered monocyclic, bicyclic or polycyclic ring having, in addition to the atom, 0-10 heteroatoms independently selected from oxygen, nitrogen, sulfur, phosphorus and silicon; or
[1027] two or more R groups on two or more atoms are optionally and independently taken together with their intervening atoms to form an optionally substituted, 3-30 membered monocyclic, bicyclic or poly cyclic ring having, in addition to the intervening atoms, 0-10 heteroatoms independently selected from oxygen, nitrogen, sulfur, phosphorus and silicon.

[1028] In some embodiments, R^{CD} is a carbohydrate moiety or a bicyclic ketal. In some embodiments, R^{CD} comprises at least one monosaccharide, disaccharide, or polysaccharide units. In some embodiments, R^{CD} comprises at least one GaINAc moiety or a derivative thereof.

[1029] In some embodiments, R^{LD} is a lipid moiety. In some embodiments, R^{LD} comprises one or more optionally substituted C₆₋₂₀ aliphatic chain. In some embodiments, R^{LD} comprises one or more unsubstituted C₆₋₂₀ aliphatic chain.

[1030] In some embodiments, at least one L^{M} is directly bound to a sugar unit of a provided oligonucleotide. In some embodiments, a L^{M} directly binds to a sugar unit incorporates a lipid moiety into a PNPLA3 oligonucleotide. In some embodiments, a L^{M} directly binds to a sugar unit incorporates a carbohydrate moiety into a PNPLA3 oligonucleotide. In some embodiments, a L^{M} directly binds to a sugar unit incorporates a R^{LD} group into a PNPLA3 oligonucleotide. In some embodiments, a L^{M} directly binds to a sugar unit incorporates a R^{CD} group into a PNPLA3 oligonucleotide.

[1031] In some embodiments, at least one L^{M} is directly bound to an internucleotidic linkage unit of a provided oligonucleotide. In some embodiments, a L^{M} directly binds to an internucleotidic linkage unit incorporates a lipid moiety into a PNPLA3 oligonucleotide, in some embodiments, a L^{M} directly binds to an internucleotidic linkage unit incorporates a carbohydrate moiety into a PNPLA3 oligonucleotide. In some embodiments, a L^{M} directly binds to an internucleotidic linkage unit incorporates a R^{LD} group into a PNPLA3 oligonucleotide. In some embodiments, a L) directly binds to an internucleotidic linkage unit incorporates a R^{CD} group into a PNPLA3 oligonucleotide.

[1032] In some embodiments, at least one L^{M} is directly bound to a nucleobase unit of a provided oligonucleotide. In some embodiments, a L^{M} directly binds to a nucleobase unit incorporates a lipid moiety into a PNPLA3 oligonucleotide, in some embodiments, a L^{M} directly binds to a nucleobase unit incorporates a carbohydrate moiety into a PNPLA3 oligonucleotide. In some embodiments, a L^{M} directly binds to a nucleo base unit incorporates a R^{LD} group into a PNPLA3 oligonucleotide. In some embodiments, a L^{M} directly binds to a nucleobase unit incorporates a R^{CD} group into a PNPLA3 oligonucleotide.

[1033] In some embodiments, [H]_{b}-A^{c} is a PNPLA3 oligonucleotide described in the present disclosure.

[1034] In some embodiments, incorporation of a lipid into a provided oligonucleotide improves distribution and/or pharmacokinetics. In some embodiments, incorporation of a lipid into a provided oligonucleotide improves one or more measurement of pharmacokinetics selected from: Cₘₐₓ, peak plasma concentration of a drug after administration; tₘₐₓ, time to reach Cₘₐₓ; Cₘᵢₙ, lowest (trough) concentration that a drug reaches before the next dose is administered; elimination half-life, the time required for the concentration of the drug to reach half of its original value; elimination rate constant, rate at which a drug is removed from the body; area under the curve, integral of the concentration-time curve (after a single dose or in steady state); and clearance, volume of plasma cleared of the drug per unit time. Without being bound to any particular theory, this disclosure notes that optimization of a pharmacokinetic characteristic such as half-life can be distinguished from maximization, in some embodiments, in general, it may be desirable for a particular drug to have a half-life sufficient to allow performance of its desired function, but short enough to minimize off target effects and other toxicity. In some embodiments, an optimized half-life is long enough to allow activity while minimizing toxicity; a prolonged or maximized half-life may be undesirable.

[1035] In some embodiments, provided oligonucleotide compositions further comprise one or more lipids. In some embodiments, provided oligonucleotide compositions further comprise one or more fatty acids. In some embodiments, the lipids can be incorporated into provided oligonucleotides in the compositions. In some embodiments, two or more same or different lipids can be incorporated into one oligonucleotide, through either the same or differently chemistry and/or locations.

[1036] Many lipids can be utilized in provided technologies in accordance with the present disclosure. In some embodiments, a lipid comprises an R^{LD} group. In some embodiments, R^{LD} is an optionally substituted, C₁₀-C₈₀ saturated or partially unsaturated aliphatic group, wherein one or more methylene units are optionally and independently replaced by an optionally substituted group selected from C₁-C₆ alkylene, C₁-C₆ alkenylene, —C≡C—, a C₁-C₆ heteroaliphatic moiety, —C(R′)₂— and -Cy-. In some embodiments, R^{LD} is an optionally substituted, C₁₀-C₆₀; saturated or partially unsaturated aliphatic group, wherein one or more methylene units are optionally and independently replaced by an optionally substituted group selected from C₁-C₆ alkylene, C₁-C₆ alkenylene, —C≡C—, a C₁-C₆ heteroaliphatic moiety, —C(R′)₂—, and -Cy-. In some embodiments, R^{LD} is a hydrocarbon group consisting of carbon and hydrogen atoms. In some embodiments, —Cy— is an optionally substituted bivalent group selected from a C₃₋₂₀ cycloaliphatic ring, a C₆₋₂₀ aryl ring, a 5-20 membered heteroaryl ring having 1-10 heteroatoms independently selected from oxygen, nitrogen, sulfur, phosphorus and silicon, and a 3-20 membered heterocyclyl ring having 1-10 heteroatoms independently selected from oxygen, nitrogen, sulfur, phosphorus, boron and silicon.

[1037] In some embodiments, R^{LD} is an optionally substituted, C₁₀-C₆₀ saturated or partially unsaturated aliphatic group, wherein one or more methylene units are optionally and independently replaced by an optionally substituted group selected from C₁-C₆ alkylene, C₁-C₆ alkenylene, —C≡C—, a C₁-C₆ heteroaliphatic moiety, —C(R′)₂—, and -Cy-. In some embodiments, R^{LD} is an optionally substituted, C₁₀-C₆₀ saturated or partially unsaturated aliphatic group, wherein one or more methylene units are optionally and independently replaced by an optionally substituted group selected from C₁-C₆ alkylene, C₁-C₆ alkenylene, —C≡C—, a C₁-C₆heteroaliphatic moiety, —C(R)₂—, and -Cy-. In some embodiments, R¹⁰ is a hydrocarbon group consisting carbon and hydrogen atoms.

[1038] In some embodiments, R^{LD} is an optionally substituted, C₁₀-C₄₀ saturated or partially unsaturated aliphatic group, wherein one or more methylene units are optionally and independently replaced by an optionally substituted group selected from C₁-C₆ alkylene, C₁-C₆ alkenylene, —C≡C—, a C₁-C₆ heteroaliphatic moiety, —C(R)₂—, and -Cy-. In some embodiments, R^{LD} is an optionally substituted, C₁₁ᵣ-C₆₀ saturated or partially unsaturated aliphatic group, wherein one or more methylene units are optionally and independently replaced by an optionally substituted group selected from C₁-C₆ alkylene, C₁-C₆ alkenylene, —C≡C—, a C₁-C₆ heteroaliphatic moiety, —C(R′₂—, and -Cy-. In some embodiments, R^{LD} is a hydrocarbon group consisting carbon and hydrogen atoms.

[1039] The aliphatic group of R^{LD} can be a variety of suitable length. In some embodiments, it is C₁₀-C₈₀. In some embodiments, it is C₁₀-C₇₅. In some embodiments, it is C₁₀-C₇₀. In some embodiments, it is C₁₀-C₆₅. In some embodiments, it is C₁₀-C₆₀. In some embodiments, it is C₁₀-C₅₀. In some embodiments, it is C₁-C₄₀. In some embodiments, it is C₁₀-C₃₅. In some embodiments, it is C₁₀-C₃₀. In some embodiments, it is C₁₀-C₂₅, in some embodiments, it is C₁₀-C₂₄. In some embodiments, it is C₁₀-C₂₃, in some embodiments, it is C₁₀-C₂₂. In some embodiments, it is C₁₀-C₂₁. In some embodiments, it is C₁₂-C₂₂. In some embodiments, it is C₁₃-C₂₂. In some embodiments, it is C₁₄-C₂₂. In some embodiments, it is C₁₅-C₂₂. In some embodiments, it is C₁₆-C₂₂. In some embodiments, it is C₁₇-C₂₂, in some embodiments, it is C₁₈-C₂₂. In some embodiments, it is C₁₀C₂₀. In some embodiments, the lower end of the range is C₁₀, C₁₁, C₁₂, C₁₃, C₁₄, C₁₅, C₁₆, C₁₇, or C₁₈, in some embodiments, the higher end of the range is C₁₈, C₁₉, C₂₀, C₂₁, C₂₂, C₂₃, C₂₄, C₂₅, C₂₆, C₂₇, C₂₈, C₂₉, C₃₀, C₃₅, C₄₀, C₄₅, C₅₀, C₅₅, or C₆₀. In some embodiments, it is C₁₀, in some embodiments, it is C₁₁, in some embodiments, it is C₁₂. In some embodiments, it is C₁₃. In some embodiments, it is C₁₄. In some embodiments, it is C₁₋₅. In some embodiments, it is C₁₆. In some embodiments, it is C₁₇. In some embodiments, it is C₁₈, in some embodiments, it is C₁₉. In some embodiments, it is C₂₀. In some embodiments, it is C₂₁. In some embodiments, it is C₂₂. In some embodiments, it is C₂₃. In some embodiments, it is C₂₄. In some embodiments, it is C₂₅. In some embodiments, it is C₃₀. In some embodiments, it is C₃₅. In some embodiments, it is C₄₀. In some embodiments, it is C₄₅. In some embodiments, it is C₅₀. In some embodiments, it is C₅₅. In some embodiments, it is C₆₀.

[1040] In some embodiments, a lipid comprises no more than one R^{LD} group. In some embodiments, a lipid comprises two or more R^{LD} groups.

[1041] In some embodiments, a lipid is conjugated to a biologically active agent, optionally through a linker, as a moiety comprising an R^{LD} group. In some embodiments, a lipid is conjugated to a biologically active agent, optionally through a linker, as a moiety comprising no more than one R^{LD} group. In some embodiments, a lipid is conjugated to a biologically active agent, optionally through a linker, as an R^{LD} group. In some embodiments, a lipid is conjugated to a biologically active agent, optionally through a linker, as a moiety comprising two or more R^{LD} groups.

[1042] In some embodiments, R^{LD} is an optionally substituted, C₁₀-C₄₀ saturated or partially unsaturated, aliphatic chain. In some embodiments, a lipid comprises an optionally substituted C₁₀-C₄₀ saturated or partially unsaturated, aliphatic chain.

[1043] In some embodiments, R^{LD} is an optionally substituted C₁₀-C₄₀ linear, saturated or partially unsaturated, aliphatic chain. In some embodiments, a lipid comprises an optionally substituted C₁₀-C₆₀ linear, saturated or partially unsaturated, aliphatic chain.

[1044] In some embodiments, R^{LD} is a C₁₀-C₄₀ linear, saturated or partially unsaturated, aliphatic chain, optionally substituted with one or more C₁₋₄ aliphatic groups. In some embodiments, a lipid comprises a C₁₀-C₄₀ linear, saturated or partially unsaturated, aliphatic chain, optionally substituted with one or more C₁₋₄ aliphatic groups. In some embodiments, R^{LD} is a C₁₀-C₄₀ linear, saturated or partially unsaturated, aliphatic chain, optionally substituted with one or more C₁₋₂ aliphatic groups. In some embodiments, a lipid comprises a C₁₀-C₄₀ linear, saturated or partially unsaturated, aliphatic chain, optionally substituted with one or more C₁₋₂ aliphatic groups. In some embodiments, R^{LD} is a C₃₀-C₄₀ linear, saturated or partially unsaturated, aliphatic chain, optionally substituted with one or more methyl groups. In some embodiments, a lipid comprises a C₁₀-C₄₀ linear, saturated or partially unsaturated, aliphatic chain, optionally substituted with one or more methyl groups.

[1045] In some embodiments, R^{LD} is an unsubstituted C₁₀-C₄₀ linear, saturated or partially unsaturated, aliphatic chain. In some embodiments, a lipid comprises an unsubstituted C₁₀-C₄₀ linear, saturated or partially unsaturated, aliphatic chain.

[1046] In some embodiments, a lipid comprises no more than one optionally substituted C₁₀-C₄₀ linear, saturated or partially unsaturated, aliphatic chain. In some embodiments, a lipid comprises two or more optionally substituted C₁₀-C₄₀ linear, saturated or partially unsaturated, aliphatic chain.

[1047] In some embodiments, R^{LD} is an optionally substituted, C₁₀-C₆₀ saturated or partially unsaturated, aliphatic chain. In some embodiments, a lipid comprises an optionally substituted C₁₀-C₆₀ saturated or partially unsaturated, aliphatic chain.

[1048] In some embodiments, R^{LD} is an optionally substituted C₁₀-C₆₀ linear, saturated or partially unsaturated, aliphatic chain. In some embodiments, a lipid comprises an optionally substituted C₁₀-C₆₀ linear, saturated or partially unsaturated, aliphatic chain.

[1049] In some embodiments, R^{LD} is a C₁₀-C₆₀ linear, saturated or partially unsaturated, aliphatic chain, optionally substituted with one or more C₁₋₄ aliphatic groups. In some embodiments, a lipid comprises a C₁₀-C₆₀ linear, saturated or partially unsaturated, aliphatic chain, optionally substituted with one or more C₁₋₄ aliphatic groups. In some embodiments, R^{LD} is a C₁₀-C₆₀ linear, saturated or partially unsaturated, aliphatic chain, optionally substituted with one or more C₁₋₂ aliphatic groups. In some embodiments, a lipid comprises a C₁₀-C₆₀ linear, saturated or partially unsaturated, aliphatic chain, optionally substituted with one or more C₁₋₂ aliphatic groups. In some embodiments, R^{LD} is a C₁₀-C₆₀ linear, saturated or partially unsaturated, aliphatic chain, optionally substituted with one or more methyl groups.

[1050] In some embodiments, a lipid comprises a C₁₀-C₆₀ linear, saturated or partially unsaturated, aliphatic chain, optionally substituted with one or more methyl groups.

[1051] In some embodiments, R^{LD} is an unsubstituted C₁₀-C₆₀ linear, saturated or partially unsaturated, aliphatic chain. In some embodiments, a lipid comprises an unsubstituted C₁₀-C₆₀ linear, saturated or partially unsaturated, aliphatic chain.

[1052] In some embodiments, a lipid comprises no more than one optionally substituted C₁₀-C₆₀ linear, saturated or partially unsaturated, aliphatic chain. In some embodiments, a lipid comprises two or more optionally substituted C₁₀-C₆₀ linear, saturated or partially unsaturated, aliphatic chain.

[1053] In some embodiments, R^{LD} is an optionally substituted, C₁₀-C₈₀ saturated or partially unsaturated, aliphatic chain, in some embodiments, a lipid comprises an optionally substituted C₁₀-C₈₀ saturated or partially unsaturated, aliphatic chain.

[1054] In some embodiments, R^{LD} is an optionally substituted C₁₀-C₈₀ linear, saturated or partially unsaturated, aliphatic chain. In some embodiments, a lipid comprises an optionally substituted C₁₀-C₈₀ linear, saturated or partially unsaturated, aliphatic chain.

[1055] In some embodiments, R^{LD} is a C₁₀-C₃₀ linear, saturated or partially unsaturated, aliphatic chain, optionally substituted with one or more C₁₋₄ aliphatic groups. In some embodiments, a lipid comprises a C₁₀-C₈₀ linear, saturated or partially unsaturated, aliphatic chain, optionally substituted with one or more C₁₋₄ aliphatic groups. In some embodiments, R^{LD} is a C₁₀-C₈₀ linear, saturated or partially unsaturated, aliphatic chain, optionally substituted with one or more C₁₋₂ aliphatic groups. In some embodiments, a lipid comprises a C₁₀-C₃₀ linear, saturated or partially unsaturated, aliphatic chain, optionally substituted with one or more C₁₋₂ aliphatic groups. In some embodiments, R^{LD} is a C₁₀-C₈₀ linear, saturated or partially unsaturated, aliphatic chain, optionally substituted with one or more methyl groups. In some embodiments, a lipid comprises a C₁₀-C₈₀ linear, saturated or partially unsaturated, aliphatic chain, optionally substituted with one or more methyl groups.

[1056] In some embodiments, R^{LD} is an unsubstituted C₁₀-C₈₀ linear, saturated or partially unsaturated, aliphatic chain. In some embodiments, a lipid comprises an unsubstituted C₁₀-C₈₀ linear, saturated or partially unsaturated, aliphatic chain.

[1057] In some embodiments, a lipid comprises no more than one optionally substituted C₁₀-C₈₀ linear, saturated or partially unsaturated, aliphatic chain. In some embodiments, a lipid comprises two or more optionally substituted C₁₀-C₈₀ linear, saturated or partially unsaturated, aliphatic chain.

[1058] In some embodiments, R^{LD} is or comprises a C₁₀ saturated linear aliphatic chain. In some embodiments, R^{LD} is or comprises a C₁₀ partially unsaturated linear aliphatic chain. In some embodiments, R^{LD} is or comprises a C₁₁ saturated linear aliphatic chain. In some embodiments, R^{LD} is or comprises a C₁₁ partially unsaturated linear aliphatic chain. In some embodiments, R^{LD} is or comprises a C₁₂ saturated linear aliphatic chain, in some embodiments, R^{LD} is or comprises a C₁₂ partially unsaturated linear aliphatic chain. In some embodiments, R^{LD} is or comprises a C₁₃ saturated linear aliphatic chain. In some embodiments, R^{LD} is or comprises a C₁₃ partially unsaturated linear aliphatic chain. In some embodiments, R^{LD} is or comprises a C₁₄ saturated linear aliphatic chain. In some embodiments, R^{LD} is or comprises a C₁₄ partially unsaturated linear aliphatic chain. In some embodiments, R^{LD} is or comprises a C₁₅ saturated linear aliphatic chain. In some embodiments, R^{LD} is or comprises a C₁₅ partially unsaturated linear aliphatic chain. In some embodiments, R^{LD} is or comprises a C₁₆ saturated linear aliphatic chain. In some embodiments, R^{LD} is or comprises a C₁₆ partially unsaturated linear aliphatic chain. In some embodiments, R^{LD} is or comprises a C₁₇ saturated linear aliphatic chain, in some embodiments, R^{LD} is or comprises a C₁₇ partially unsaturated linear aliphatic chain. In some embodiments, R^{LD} is or comprises a C₁₈ saturated linear aliphatic chain. In some embodiments, R^{LD} is or comprises a C₁₈ partially unsaturated linear aliphatic chain. In some embodiments, R^{LD} is or comprises a C₁₉ saturated linear aliphatic chain. In some embodiments, R^{LD} is or comprises a C₁₉ partially unsaturated linear aliphatic chain, in some embodiments, R^{LD} is or comprises a C₂₀ saturated linear aliphatic chain. In some embodiments, R^{LD} is or comprises a C₂₀ partially unsaturated linear aliphatic chain. In some embodiments, R^{LD} is or comprises a C₂₁ saturated linear aliphatic chain. In some embodiments, R^{LD} is or comprises a C₂₁ partially unsaturated linear aliphatic chain. In some embodiments, R^{LD} is or comprises a C₂₂ saturated linear aliphatic chain. In some embodiments, R^{LD} is or comprises a C₂₂ partially unsaturated linear aliphatic chain. In some embodiments, R^{LD} is or comprises a C₂₃ saturated linear aliphatic chain. In some embodiments, R^{LD} is or comprises a C₂₃ partially unsaturated linear aliphatic chain. In some embodiments, R^{LD} is or comprises a C₂₄ saturated linear aliphatic chain. In some embodiments, R^{LD} is or comprises a C₂₄ partially unsaturated linear aliphatic chain. In some embodiments, R^{LD} is or comprises a C₂₅ saturated linear aliphatic chain, in some embodiments, R^{LD} is or comprises a C₂₅ partially unsaturated linear aliphatic chain, in some embodiments, R^{LD} is or comprises a C₂₆ saturated linear aliphatic chain. In some embodiments, R^{LD} is or comprises a C₂₆ partially unsaturated linear aliphatic chain, in some embodiments, R^{LD} is or comprises a C₂₇ saturated linear aliphatic chain. In some embodiments, R^{LD} is or comprises a C₂₇ partially unsaturated linear aliphatic chain. In some embodiments, R^{LD} is or comprises a C₂₈ saturated linear aliphatic chain. In some embodiments, R^{LD} is or comprises a C₂₈ partially unsaturated linear aliphatic chain. In some embodiments, R^{LD} is or comprises a C₂₉ saturated linear aliphatic chain. In some embodiments, R^{LD} is or comprises a C₂₉ partially unsaturated linear aliphatic chain. In some embodiments, R^{LD} is or comprises a C₃₀ saturated linear aliphatic chain. In some embodiments, R^{LD} is or comprises a C₃₀ partially unsaturated linear aliphatic chain.

[1059] In some embodiments, R^{LD} is derived from cholesterol or a derivatives thereof, e.g., R^{LD}—H is optionally substituted cholesterol or a derivative thereof.

[1060] In some embodiments, a lipid has the structure of R^{LD}—OH. In some embodiments, a lipid has the structure of R^{LD}—C(O)OH. In some embodiments. R^{LD} is

[chemical structure]

In some embodiments, a lipid is lauric acid, myristic acid, palmitic acid, stearic acid, oleic acid, linoleic acid, alpha-linolenic acid, gamma-linolenic acid, docosahexaenoic acid (DHA or cis-DHA), turbinaric acid, arachidonic acid, and dilinoleyl. In some embodiments, a lipid is lauric acid, myristic acid, palmitic acid, stearic acid, oleic acid, linoleic acid, alpha-linolenic acid, gamma-linolenic acid, docosahexaenoic acid (DHA or cis-DHA), turbinaric acid and dilinoleyl. In some embodiments, a lipid has a structure of:

[chemical structure]

[1061] In some embodiments, a lipid is, comprises or consists of any of: an at least partially hydrophobic or amphiphilic molecule, a phospholipid, a triglyceride, a diglyceride, a monoglyceride, a fat-soluble vitamin, a sterol, a fat and a wax. In some embodiments, a lipid is any of: a fatty acid, glycerolipid, glycerophospholipid, sphingolipid, sterol lipid, prenol lipid, saccharolipid, polyketide, and other molecule.

[1062] Lipids can be incorporated into provided technologies through many types of methods in accordance with the present disclosure. In some embodiments, lipids are physically mixed with provided oligonucleotides to form provided compositions. In some embodiments, lipids are chemically conjugated with oligonucleotide moieties.

[1063] In some embodiments, provided compositions comprise two or more lipids. In some embodiments, provided oligonucleotides comprise two or more conjugated lipids. In some embodiments, the two or more conjugated lipids are the same. In some embodiments, the two or more conjugated lipids are different. In some embodiments, provided oligonucleotides comprise no more than one lipid. In some embodiments, oligonucleotides of a provided composition comprise different types of conjugated lipids, in some embodiments, oligonucleotides of a provided composition comprise the same type of lipids.

[1064] Lipids can be conjugated to oligonucleotides optionally through linkers. Various types of linkers in the art can be utilized in accordance of the present disclosure. In some embodiments, a linker is L^{M} as described in the present disclosure. In some embodiments, a linker comprise a phosphate group, which can, for example, be used for conjugating lipids through chemistry similar to those employed in oligonucleotide synthesis. In some embodiments, a linker comprises an amide, ester, or ether group.

[1065] In some embodiments, a linker has the structure of -L^{M}-. In some embodiments, L^{M} is L^{D}. In some embodiments, L^{D} is T^{D} having the structure of

[chemical structure]

wherein each variable is independently as defined and described. In some embodiments, T^{D} has the structure of formula I. In some embodiments, T^{D} with the 5′-O— of a PNPLA3 oligonucleotide moiety form a phosphorothioate linkage (—OP(O)(S⁻)O—). In some embodiments, T^{D} with the 5′-O— of a PNPLA3 oligonucleotide moiety form an Sp phosphorothioate linkage. In some embodiments, T^{D} with the 5′-O— of a PNPLA3 oligonucleotide moiety form an Rp phosphorothioate linkage. In some embodiments, T^{D} with the 5′-O— of a PNPLA3 oligonucleotide moiety form a phosphate linkage (—OP(O)(O⁻)O—). In some embodiments, T^{D} with the 5′-O— of a PNPLA3 oligonucleotide moiety form a phosphorodithioate linkage. In some embodiments, L^{D} is -L-T^{D}-. In some embodiments, Y connects to -L- and —Z— is a covalent bond, so that P directly connects to a hydroxyl group of the oligonucleotide moiety. In some embodiments, P connects to the 5′-end hydroxyl (5′-O—) to form a phosphate group (natural phosphate linkage) or phosphorothioate group (phosphorothioate linkage), in some embodiments, the phosphorothioate linkage is chirally controlled and can be either Rp or Sp. Unless otherwise specified, chiral centers in the linkers (e.g., P in T^{D}) can be either stereorandom or chirally controlled, and they are not considered as part of the backbone chiral centers, e.g., for determining whether a composition is chirally controlled. In some embodiments, LP is NH—(CH₂)₆-T^{D}-. In some embodiments, Lt) is —C(O)—NH—(CH₂)₆-T^{D}-.

[1066] In some embodiments, a linker has the structure of -L-. In some embodiments, after conjugation to oligonucleotides, a lipid forms a moiety having the structure of -L-R^{LD}, wherein each of L and R^{LD} is independently as defined and described herein.

[1067] In some embodiments, -L- comprises a bivalent aliphatic chain. In some embodiments, -L-comprises a phosphate group. In some embodiments, -L- comprises a phosphorothioate group. In some embodiments, -L- has the structure of -C(O)NH—(CH₂)₆—OP(═O)(S⁻)—. In some embodiments, -L- has the structure of —C(O)NH—(CH₂)—OP(═O)(O⁻)—.

[1068] Lipids, optionally through linkers, can be incorporated into oligonucleotides at various suitable locations. In some embodiments, lipids are conjugated through the 5′-OH group. In some embodiments, lipids are conjugated through the 3′-OH group. In some embodiments, lipids are conjugated through one or more sugar moieties. In some embodiments, lipids are conjugated through one or more bases. In some embodiments, lipids are incorporated through one or more internucleotidic linkages. In some embodiments, a PNPLA3 oligonucleotide may contain multiple conjugated lipids which are independently conjugated through its 5′-OH, 3′-OH, sugar moieties, base moieties and/or internucleotidic linkages.

[1069] In some embodiments, a linker is a moiety that connects two parts of a composition; as a non-limiting example, a linker physically connects a PNPLA3 oligonucleotide moiety to a lipid. Non-limiting examples of suitable linkers include: an uncharged linker; a charged linker; a linker comprising an alkyl; a linker comprising a phosphate; a branched linker: an unbranched linker; a linker comprising at least one cleavage group; a linker comprising at least one redox cleavage group; a linker comprising at least one phosphate-based cleavage group; a linker comprising at least one acid-cleavage group; a linker comprising at least one ester-based cleavage group; a linker comprising at least one peptide-based cleavage group.

[1070] In some embodiments, a lipid is conjugated to an active compound optionally through a linker moiety. A person having ordinary skill in the art appreciates that various technologies can be utilized to conjugate lipids to active compound in accordance with the present disclosure. For example, for lipids comprising carboxyl groups, such lipids can be conjugated through the carboxyl groups. In some embodiments, a lipid is conjugated through a linker having the structure of -L-, wherein L is as defined and described in formula I. In some embodiments, L comprises a phosphate diester or modified phosphate diester moiety, in some embodiments, a compound formed by lipid conjugation has the structure of (R^{LD}-L-)ₐ (active compound), wherein a is 1 or an integer greater than 1, and each of R^{LD} and L is independently as defined and described herein, in some embodiments, a is 1. In some embodiments, a is greater than 1. In some embodiments, a is 1-50. In some embodiments, an active compound is a PNPLA3 oligonucleotide. For example, in some embodiments, a conjugate has any of the following structures:

[chemical structure]

wherein Oligo indicates an oligonucleotide.

[1071] In some embodiments, a linker is selected from: an uncharged linker; a charged linker; a linker comprising an alkyl; a linker comprising a phosphate; a branched linker; an unbranched linker, a linker comprising at least one cleavage group; a linker comprising at least one redox cleavage group; a linker comprising at least one phosphate-based cleavage group; a linker comprising at least one acid-cleavage group; a linker comprising at least one ester-based cleavage group; and a linker comprising at least one peptide-based cleavage group. In some embodiments, a linker, e.g., L^{M}, has the structure of -L^{LD}-. In some embodiments, a linker, e.g., L^{M}, has the structure of -L-. In some embodiments, a linker comprises a linkage of formula I. In some embodiments, a linker is —C(O)NH—(CH₂)₆-L¹-, wherein L¹ has the structure of formula I as described herein. In some embodiments, a linker is —C(O)NH—(CH₂)₆—O—P(═O)(SR¹)—O—. In some embodiments, R¹ is —H, and a linker is —C(O)NH—(CH₁)₆—O—P(═O)(SH)—O—, in some conditions, e.g., certain pH, —C(O)NH—(CH₂)₆—O—P(═O)(S⁻)—O—. In some embodiments, a linker is —C(O)NH—(CH₂)₆—O—P(═S)(SR¹)—O—. In some embodiments, R¹ is —H, and a linker is —C(O)NH—(CH₂)₆—O—P(═S)(SH)—O—, in some conditions, e.g., certain pH, —C(O)NH—(CH₂)₆—O—P(═S)(S⁻)—O—. In some embodiments, a linker is —C(O)NH—(CH₂)₆—O—P(═S)(OR¹)—O—, wherein R¹ is —CH₂CH₂CN. In some embodiments, a linker is —C(O)NH—(CH₂)₆—O—P(═S)(SR¹)—O—, wherein R¹ is —CH₂CH₂CN. In some embodiments, a provided oligonucleotide is coupled with a linker and forms a structure of H-linker-oligonucleotide. In some embodiments, a provided oligonucleotide is conjugated to a lipid and forms the structure of lipid-linker-oligonucleotide, e.g. R^{LD}-L^{LD}-oligonucleotide. In some embodiments, the —O-end of a linker is connected to a PNPLA3 oligonucleotide. In some embodiments, the —O— end of a linker is connected to the 5′-end oligonucleotide (—O— being the oxygen in the 5′-OH).

[1072] In some embodiments, a linker, e.g., L^{M}, comprises a PO (phosphodiester linkage), a PS (phosphorothioate linkage) or PS2 (phosphomdithioate linkage). A non-limiting example including a PS linker is shown below. In some embodiments, a linker is —O—P(O)(OH)—O— [phosphodiester], —O—P(O)(SH)—O— [phosphorothioate] or —O—P(S)(SH)—O— [phosphorodithioate], in some embodiments, a linker comprises a C₆ amino moiety (—NH—(CH₂)₅—), which is illustrated below. In some embodiments, a linker comprises a C₆ amino bound to a PO, a PS, or PS2. In some embodiments, a linker is a C₆ amino bound to a PO, a PS, or PS2. In some embodiments, a linker, e.g., L^{LD} or L, is —C(O)—NH—(CH₂)₆—P(O)(OH)—. In some embodiments, a linker, e.g., L^{LD} or L, is —C(O)—NH—(CH₂)₆— P(O)(OH)—, wherein —C(O)— is connected to a lipid moiety and —P(O)(OH)— is connected to a PNPLA3 oligonucleotide moiety. In some embodiments, a linker, e.g., L^{LD} or L, is —C(O)—NH—(CH₂)₆— P(O)(OH)—, wherein —C(O)— is connected to a lipid moiety and —P(O)(OH)— is connected to the 5′-O— of a PNPLA3 oligonucleotide moiety. In some embodiments, a linker, e.g., L^{LD} or L, is —C(O)—NH—(CH₂)₆—P(O)(OH)—, wherein —C(O)— is connected to a lipid moiety and —P(O)(OH)— is connected to the 3′-O— of PNPLA3 oligonucleotide moiety. In some embodiments, a linker, e.g., L^{LD} or L, is —C(O)—NH—(CH₂)₆— P(O)(SH)—. In some embodiments, a linker, e.g., L^{LD} or L, is —C(O)—NH—(CH₂)₆—P(O)(SH)—, wherein —C(O)— is connected to a lipid moiety and —P(O)(SH)— is connected to a PNPLA3 oligonucleotide moiety. In some embodiments, a linker, e.g., L^{LD} or L, is —C(O)—NH—(CH₂)₆—P(O)(SH) wherein —C(O)— is connected to a lipid moiety and —P(O)(SH)— is connected to the 5′-O— of a PNPLA3 oligonucleotide moiety. In some embodiments, a linker, e.g., L^{LD} or L, is —C(O)—NH—(CH₂)₆—P(O)(SH)—, wherein —C(O)— is connected to a lipid moiety and —P(O)(SH)— is connected to the 3′-O— of a PNPLA3 oligonucleotide moiety. In some embodiments, a linker, e.g., L^{LD} or L, is —C(O)—NH—(CH₂)₆—P(S)(SH)—. In some embodiments, a linker, e.g., L^{LD} or L, is —C(O)—NH—(CH₂)₆—P(S)(SH)—, wherein —C(O)— is connected to a lipid moiety and —P(S)(SH)— is connected to a PNPLA3 oligonucleotide moiety. In some embodiments, a linker, e.g., L^{LD} or L, is —C(O)—NH—(CH₂)₆—P(S)(SH)—, wherein —C(O)— is connected to a lipid moiety and —P(S)(SH)— is connected to the 5′-O— of a PNPLA3 oligonucleotide moiety. In some embodiments, a linker, e.g., L^{LD} or L, is —C(O)—NH—CH₂)₆, —P(S)(SH)—, wherein —C(O)— is connected to a lipid moiety and —P(S)(SH)— is connected to the 3′-O— of a PNPLA3 oligonucleotide moiety. As appreciated by a person having ordinary skill in the art, at certain pH —P(O)(OH)—, —P(O)(SH)—, —P(S)(SH)— may exist as —P(O)(O⁻)—, —P(O)(S⁻)—, —P(S)(S⁻)—, respectively. In some embodiments, a lipid moiety is R^{LD}.

[chemical structure]

[1073] Various chemistry and linkers can be used for conjugation in accordance with the present disclosure. For example, in some embodiment, a lipid is incorporated using chemistry described below, or similar processes:

[chemical structure]

[chemical structure]

[1074] In some embodiments, a lipid is incorporated into a PNPLA3 oligonucleotide directly through a nucleobase, for example:

[chemical structure]

In some embodiments, a provided oligonucleotide comprises -L^{M}-R^{LD} directly bonded to a nucleobase. In some embodiments, a provided oligonucleotide comprises

[chemical structure]

In some embodiments, a linker (L^{M}) is

[chemical structure]

In some embodiments, a linker (L^{M}) is

[chemical structure]

In some embodiments, a lipid moiety, R^{LD}, is

[chemical structure]

In some embodiments, provided oligonucleotide comprises

[chemical structure]

[1075] In some embodiments, a provided oligonucleotide comprises a carbohydrate moiety connected to the oligonucleotide moiety, option through a linker, at a nucleobase. In some embodiments, the nucleobase is T. In some embodiments, the nucleobase is protected T, in some embodiments, the nucleobase is optionally substituted T. In some embodiments, the connection is at the 5-carbon of a T or an optionally substituted T. In some embodiments, a provided oligonucleotide comprises one or mom wherein each variable is independently as described in the present disclosure. In some embodiments, a provided oligonucleotide comprises one or more -L^{M}-(R^{LD})a, which is bonded to a nucleobase, wherein each variable is independently as described in the resent disclosure. In some embodiments, a provided oligonucleotide comprises one or more

[chemical structure]

wherein each variable is independently as described in the present disclosure. In some embodiments, a provided oligonucleotide comprises one or more

[chemical structure]

wherein each variable is independently as described in the present disclosure. In some embodiments, a provided oligonucleotide comprises one or more

[chemical structure]

wherein each variable is independently as described in the present disclosure. In some embodiments, a provided oligonucleotide comprises one or more

[chemical structure]

wherein each variable is independently as described in the present disclosure. In some embodiments, a provided oligonucleotide comprises one or more

[chemical structure]

wherein each variable is independently as described in the present disclosure. In some embodiments, a provided oligonucleotide comprises one or more

[chemical structure]

wherein each variable is independently as described in the present disclosure. In some embodiments, a provided oligonucleotide comprises one or more

[chemical structure]

wherein X is O or S, R¹ is H, and each other variable is independently as described in the present disclosure. In some embodiments, R^{2a} and R^{4a} are hydrogen. In some embodiments, a provided oligonucleotide comprises one or more

[chemical structure]

wherein X is O or S, R¹ is H, and each other variable is independently as described in the present disclosure.

[1076] In some embodiments, a is 1. In some embodiments, a provided oligonucleotide comprises one or more -L^{M}-R^{CD}, which is bonded to a nucleobase, wherein each variable is independently as described in the present disclosure. In some embodiments, the nucleobase is T. In some embodiments, the nucleobase is protected T. In some embodiments, the nucleobase is optionally substituted T. In some embodiments, the connection is at the 5-carbon of a T or an optionally substituted T. In some embodiments, a provided oligonucleotide comprises one or more

[chemical structure]

wherein each variable is independently as described in the present disclosure. In some embodiments, a provided oligonucleotide comprises one or more

[chemical structure]

wherein each variable is independently as described in the present disclosure. In some embodiments, a provided oligonucleotide comprises one or more

[chemical structure]

wherein each variable is independently as described in the present disclosure. In some embodiments, a provided oligonucleotide comprises one or more

[chemical structure]

wherein each variable is independently as described in the present disclosure. In some embodiments, a provided oligonucleotide comprises one or more

[chemical structure]

wherein each variable is independently as described in the present disclosure. In some embodiments, a provided oligonucleotide comprises one or more

[chemical structure]

wherein each variable is independently as described in the present disclosure. In some embodiments, a provided oligonucleotide comprises one or more

[chemical structure]

wherein X is O or S, R¹ is H, and each other variable is independently as described in the present disclosure. In some embodiments, R^{2a} and R^{4a} are hydrogen. In some embodiments, a provided oligonucleotide comprises one or more

[chemical structure]

wherein X is O or S, R¹ is H, and each other variable is independently as described in the present disclosure.

[1077] In some embodiments, the present disclosure provides a composition comprising a PNPLA3 oligonucleotide comprising a lipid moiety comprising or being a C₁₀-C₄₀ linear, saturated or partially unsaturated, aliphatic chain. In some embodiments, the present disclosure provides a composition comprising a PNPLA3 oligonucleotide comprising a lipid moiety comprising or being a C₁₀-C₄₀ linear, saturated or partially unsaturated, aliphatic chain, optionally substituted with one or more C₁₋₄ aliphatic group.

[1078] In some embodiments, a composition comprises a PNPLA3 oligonucleotide comprising a lipid moiety formed through conjugation of a compound selected from: lauric acid, myristic acid, palmitic acid, stearic acid, oleic acid, linoleic acid, alpha-linolenic acid, gamma-linolenic acid, docosahexaenoic acid (cis-DHA), turbinaric acid, arachidonic acid, and dilinoleyl alcohol

[1079] In some embodiments, a linker is a moiety that connects two parts of a composition; as a non-limiting example, a linker physically connects a PNPLA3 oligonucleotide to a lipid. Non-limiting examples of suitable linkers include: an uncharged linker; a charged linker; a linker comprising an alkyl; a linker comprising a phosphate; a branched linker; an unbranched linker; a linker comprising at least one cleavage group; a linker comprising at least one redox cleavage group; a linker comprising at least one phosphate-based cleavage group; a linker comprising at least one acid-cleavage group; a linker comprising at least one ester-based cleavage group; a linker comprising at least one peptide-based cleavage group. In some embodiments, a linker is an uncharged linker or a charged linker. In some embodiments, a linker comprises an alkyl.

[1080] In some embodiments, a linker comprises a phosphate. In various embodiments, a phosphate can also be modified by replacement of a bridging oxygen, (i.e. oxygen that links the phosphate to the nucleoside), with nitrogen (bridged phosphoroamidates), sulfur (bridged phosphorothioates) and carbon (bridged methylenephosphonates). The replacement can occur at the either linking oxygen or at both the linking oxygens. In some embodiments, the bridging oxygen is the 3′-oxygen of a nucleoside, replacement with carbon is done, in some embodiments, the bridging oxygen is the 5′-oxygen of a nucleoside, replacement with nitrogen is done. In various embodiments, the linker comprising a phosphate comprises any one or more of: a phosphorodithioate, phosphoramidate, boranophosphonoate, or a compound of formula (I):

[chemical structure]

where R³ is selected from OH, SH, NH₂, BH₃, CH₃, C₁₋₆ alkyl, C₆₋₁₀ aryl, C₁₋₆ alkoxy and C₆₋₁₀ aryl-oxy, wherein C₁₋₆ alkyl and C₆₋₁₀ aryl are unsubstituted or optionally independently substituted with 1 to 3 groups independently-selected from halo, hydroxyl and NH₂; and R⁴ is selected from O, S, NH, or CH₂.

[1081] In some embodiments, a linker comprises a direct bond or an atom such as oxygen or sulfur, a unit such as NR¹, C(O), C(O)NH, SO, SO₂, SO₂NH or a chain of atoms, such as substituted or unsubstituted alkyl, substituted or unsubstituted alkenyl, substituted or unsubstituted alkenyl, arylalkyl arylalkenyl, arylalkynyl, heteroarylalkyl, heteroarylalkenyl, heteroarylalkynyl, heterocyclylalkyl, heterocyclylalkenyl, heterocyclylalkynyl, aryl, heteroaryl, heterocyclyl, cycloalkyl, cycloalkenyl, alkylarylalkyl, alkylarylalkenyl, alkylarylalkynyl, alkenylarylalkyl, alkenylarylalkenyl, alkenylarylalkynyl, alkynylaiylalkyl, alkynylarylalkenyl, alkynylarylalkynyl, alkylheteroarylalkyl, alkylheteroarylalkenyl, alkylheteroarylalkynyl, alkenylheteroarylalkyl, alkenylheteroarylalkenyl, alkenylheteioarylalkynyl, alkynylheteroarylalkyl, alkynylheteroarylalkenyl, alkynylheteroarylalkynyl, alkylheterocyclylalkyl, alkylheterocyclylalkenyl, alkylhererocyclylalkynyl, alkenylheterocyclylalkyl, alkenylheterocyclylalkenyl, alkenylheterocyclylalkynyl, alkynylheterocyclylalkyl, alkynylheterocyclylalkenyl alkynylheterocyclylalkynyl, alkylaryl, alkenylaryl, alkynylaryl, alkylheteroaryl, alkenylheteroaryl, alkenylheteroaryl, where one or more methylenes can be interrupted or terminated by O, S, S(O), SO₂, N(R₁)₂, C(O), cleavable linking group, substituted or unsubstituted aryl, substituted or unsubstituted heteroaryl, substituted or unsubstituted heterocyclic; where R¹ is hydrogen, acyl, aliphatic or substituted aliphatic.

[1082] In some embodiments, a linker is a branched linker. In some embodiments, a branchpoint of the branched linker may be at least trivalent, but may be a tetravalent, pentavalent or hexavalent atom, or a group presenting such multiple valencies. In some embodiments, a branchpoint is —N, N(Q)-C, —O—C, —S—C, —SS—C, —C(O)N(Q)-C, —OC(O)N(Q)-C, N(Q)C(O)—C, or N(Q)C(O)O—C; wherein Q is independently for each occurrence H or optionally substituted alkyl. In other embodiment, the branchpoint is glycerol or glycerol derivative.

[1083] In one embodiment, a linker comprises at least one cleavable linking group. As a non-limiting example, a cleavable linking group can be sufficiently stable outside the cell, but which upon wiry into a target cell is cleaved to release the two parts the linker is holding together. As anon-limiting example, a cleavable linkage group, such as a disulfide bond can be susceptible to pH. As a non-limiting example, a linker can include a cleavable linking group that is capable of being cleaved by an enzyme. As a non-limiting example, a linker can contain a peptide bond, which can be used when targeting cell types rich in peptidases, such as liver cells and synoviocytes. As a non-limiting example, suitability of a candidate cleavable linking group can be evaluated by testing the ability of a degradative agent (or condition) to cleave the candidate linking group, in some embodiments, a linker comprises a redox cleavable linking group, a phosphate-based cleavable linking groups, which are cleavable by agents that degrade or hydrolyze the phosphate group, a linker comprises an acid cleavable linking group, an ester-based linking group, and/or a peptide-based cleaving group.

[1084] My linker reported in the art can be used, including, as non-limiting examples, those described in: U.S. Pat. application. No, 20150265708.

[1085] In some embodiments, a lipid is conjugated to a PNPLA3 oligonucleotide using any method known in the art in accordance with the present disclosure.

### Targeting Moieties

[1086] In some embodiments, a provided oligonucleotide or oligonucleotide composition further comprises a targeting component or moiety. A targeting moiety can be either conjugated or not conjugated to a PNPLA3 oligonucleotide moiety. In some embodiments, a targeting moiety is a lipid. In some embodiments, a targeting moiety is a carbohydrate or a bicyclic ketal. In some embodiments, a targeting moiety is —R^{LD} as described in the present disclosure. In some embodiments, a targeting moiety is —R^{CD} as described in the present disclosure.

[1087] Targeting moieties can be incorporated into provided technologies through many types of methods in accordance with the present disclosure, for example, those described for lipids and carbohydrates. In some embodiments, targeting moieties are physically mixed with provided oligonucleotides to form provided compositions. In some embodiments, a targeting moiety is conjugated to a PNPLA3 oligonucleotide. In some embodiments, a targeting moiety is not conjugated to a PNPLA3 oligonucleotide.

[1088] In some embodiments, provided compositions comprise two or more targeting moieties. In some embodiments, provided oligonucleotides comprise two or more conjugated targeting moieties. In some embodiments, the two or more conjugated targeting moieties are the same. In some embodiments, the two or more conjugated targeting moieties are different. In some embodiments, provided oligonucleotides comprise no more than one targeting moiety. In some embodiments, oligonucleotides of a provided composition comprise different types of conjugated targeting moieties. In some embodiments, oligonucleotides of a provided composition comprise the same type of targeting moieties.

[1089] Targeting moieties can be conjugated to oligonucleotides optionally through linkers, for example, as described for lipids and carbohydrates. Various types of linkers in the art can be utilized in accordance of the present disclosure. In some embodiments, a linker comprises a phosphate group, which can, for example, be used for conjugating targeting moieties through chemistry similar to those employed in oligonucleotide synthesis. In some embodiments, a linker comprises an amide, ester, or ether group, in some embodiments, a linker has the structure of -L-. Targeting moieties can be conjugated through either the same or different linkers compared to lipids.

[1090] Targeting moieties, optionally through linkers, can be conjugated to oligonucleotides at various suitable locations. In some embodiments, targeting moieties are conjugated through the 5′-OH group. In some embodiments, targeting moieties are conjugated through the 3′-OH group. In some embodiments, targeting moieties are conjugated through one or more sugar moieties. In some embodiments, targeting moieties are conjugated through one or more bases. In some embodiments, targeting moieties are incorporated through one or more internucleotidic linkages, in some embodiments, a PNPLA3 oligonucleotide may contain multiple conjugated targeting moieties which are independently conjugated through its 5′-OH, 3′-OH, sugar moieties, base moieties and/or internucleotidic linkages. Targeting moieties and lipids can be conjugated either at the same, neighboring and/or separated locations. In some embodiments, a targeting moiety is conjugated at one end of a PNPLA3 oligonucleotide, and a lipid is conjugated at the other end.

[1091] In some embodiments, a targeting moiety interacts with a protein on the surface of targeted cells. In some embodiments, such interaction facilitates internalization into targeted cells. In some embodiments, a targeting moiety comprises a sugar moiety. In some embodiments, a targeting moiety comprises a polypeptide moiety, in some embodiments, a targeting moiety comprises an antibody. In some embodiments, a targeting moiety is an antibody. In some embodiments, a targeting moiety comprises an inhibitor. In some embodiments, a targeting moiety is a moiety from a small molecule inhibitor. In some embodiments, an inhibitor is an inhibitor of a protein on the surface of targeted cells. In some embodiments, an inhibitor is a carbonic anhydrase inhibitor, in some embodiments, an inhibitor is a carbonic anhydrase inhibitor expressed on the surface of target cells, in some embodiments, a carbonic anhydrase is I, II, III, IV, V. VI, VII, VIII, IX, X, XI, XII, XIII, XIV, XV or XVI. In some embodiments, a carbonic anhydrase is membrane bound, in some embodiments, a carbonic anhydrase is IV, LX, XII or XIV. In some embodiments, an inhibitor is for IV, IX, XII and/or XIV. In some embodiments, an inhibitor is a carbonic anhydrase III inhibitor, in some embodiments, an inhibitor is a carbonic anhydrase IV inhibitor, in some embodiments, an inhibitor is a carbonic anhydrase IX inhibitor. In some embodiments, an inhibitor is a carbonic anhydrase Xii inhibitor. In some embodiments, an inhibitor is a carbonic anhydrase XIV inhibitor. In some embodiments, an inhibitor comprises or is a sulfonamide (e.g., those described in Supuran, CT. Nature Rev Drug Discover 2008, 7, 168-181, which sulfonamides are incorporated herein by reference), in some embodiments, an inhibitor is a sulfonamide. In some embodiments, targeted cells are muscle cells.

[1092] In some embodiments, a targeting moiety is R^{TD}, wherein R^{TD} is R^{LD} or R^{CD} as described in the present disclosure.

[1093] In some embodiments, a targeting moiety is R^{LD} as defined and described in the present disclosure. In some embodiments, the present disclosure provides oligonucleotides comprising R^{LD}. In some embodiments, the present disclosure provides oligonucleotide compositions comprising oligonucleotides comprising R^{LD}, in some embodiments, the present disclosure provides oligonucleotide compositions comprising a first plurality of oligonucleotides comprising R^{LD}. In some embodiments, the present disclosure provides chirally controlled oligonucleotide compositions of oligonucleotides comprising R^{LD}.

[1094] In some embodiments, a targeting moiety is R^{CD} as defined and described in the present disclosure. In some embodiments, the present disclosure provides oligonucleotides comprising R^{CD}, in some embodiments, the present disclosure provides oligonucleotide compositions comprising oligonucleotides comprising R^{CD}. In some embodiments, the present disclosure provides oligonucleotide compositions comprising a first plurality of oligonucleotides comprising R^{CD}. In some embodiments, the present disclosure provides chirally controlled oligonucleotide compositions of oligonucleotides comprising R^{CD}.

[1095] In some embodiments, R^{TD} comprises or is

[chemical structure]

In some embodiments, RID comprises or is

[chemical structure]

In some embodiments, R^{TD} comprises or is

[chemical structure]

In some embodiments, R^{TD} comprises or is

[chemical structure]

In some embodiments, R^{TD} comprises or is

[chemical structure]

In some embodiments, R^{TD} comprises or is

[chemical structure]

In some embodiments, R^{TD} comprises or is

[chemical structure]

In some embodiments, R^{TD} comprises or is

[chemical structure]

In some embodiments, R^{TD} comprises or is

[chemical structure]

In some embodiments, R^{TD} comprises or is

[chemical structure]

In some embodiments. R^{TD} comprises or is

[chemical structure]

In some embodiments. R^{TD} comprises

[chemical structure]

In some embodiments, R^{TD} comprises or is

[chemical structure]

In some embodiments, R^{TD} comprises or is

[chemical structure]

In some embodiments, R^{TD} comprises or is

[chemical structure]

In some embodiments, R^{TD} is a targeting moiety that comprises or is a lipid moiety. In some embodiments, X is O. In some embodiments, X is S.

[1096] In some embodiments, the present disclosure provides technologies (e.g., reagents, methods, etc.) for conjugating various moieties to oligonucleotide moieties. In some embodiments, the present disclosure provides technologies for conjugating targeting moiety to oligonucleotide moieties. In some embodiments, the present disclosure provides acids comprising targeting moieties for conjugation, e.g., R^{LD}—COOH. In some embodiments, the present disclosure provides linkers for conjugation, e.g., L^{M}. A person having ordinary skill in the art understands that many known and widely practiced technologies can be utilized for conjugation with oligonucleotide moieties in accordance with the present disclosure. In some embodiments, a provided acid is

[chemical structure]

In some embodiments, a provided acid is

[chemical structure]

In some embodiments, a provided acid is

[chemical structure]

In some embodiments, a provided acid is

[chemical structure]

In some embodiments, a provided acid is a fatty acid, which can provide a lipid moiety as a targeting moiety. In some embodiments, the present disclosure provides methods and reagents for preparing such acids.

[1097] In some embodiments, a PNPLA3 oligonucleotide, a PNPLA3 oligonucleotide capable of directing a decrease in the expression and/or level of a target gene or its gene product can comprise any lipid described herein or known in the art.

[1098] In some embodiments, a PNPLA3 oligonucleotide, a PNPLA3 oligonucleotide that directs RNA interference, a PNPLA3 oligonucleotide that directs RNase H-mediated knockdown, or a PNPLA3 oligonucleotide that directs both RNA interference and RNase H-mediated knockdown can comprise any lipid described herein or known in the art.

[1099] In some embodiments, a provided oligonucleotide comprises a lipid moiety. In some embodiments, a lipid moiety is incorporated by conjugation with a lipid. In some embodiments, a lipid is a fatty acid. In some embodiments, a PNPLA3 oligonucleotide is conjugated to a fatty acid. In some embodiments, a provided single-stranded RNAi agent comprises a lipid. In some embodiments, a provided single-stranded RNAi agent comprises a lipid conjugated to a nucleotide in the seed region. In some embodiments, a provided single-stranded RNAi agent comprises a lipid conjugated to a nucleotide in the post-seed region. In some embodiments, a provided single-stranded RNAi agent comprises a lipid conjugated at the 1^{st}, 2^{rd}, 3^{rd}, 4^{th}, 5^{th}, 6^{th}, 7^{th}, 8^{th}, 9^{th}, 10^{th}, 11^{th}, 12^{th}, 13^{th}, 14^{th}, 15^{th}, 16^{t}, 17^{th}, 18^{th}, 19^{th}, 20^{th}, 21^{st}, 22^{nd}, 23^{rd}, 24^{th}, or 25^{th} nucleotide (counting from the 5′-end). In some embodiments, a provided single-stranded RNAi agent comprises a lipid conjugated at the 9^{th} or 11^{th} nucleotide (counting from the 5′-end). In some embodiments, a PNPLA3 oligonucleotide is conjugated at the base to a fatty acid. In some embodiments, a provided single-stranded RNAi agent comprises a lipid. In some embodiments, a provided single-stranded RNAi agent comprises a lipid conjugated at the base at the 9^{th} or 11^{th} nucleotide (counting from the 5′-end).

[1100] In some embodiments, a fatty acid comprises 10, 11, 12, 13, 14, 15, 16, 17, 18, 19, 20, 21, 22, 23, 24, 25, 26, 27, 28, 29, 30 or more carbon atoms. In some embodiments, a fatty acid comprises 10 or more carbon atoms. In some embodiments, a fatty acid comprises 11 or more carbon atoms. In some embodiments, a fatty acid comprises 12 or more carbon atoms. In some embodiments, a fatty acid comprises 13 or more carbon atoms. In some embodiments, a fatty acid comprises 14 or more carbon atoms. In some embodiments, a fatty acid comprises 15 or more carbon atoms. In some embodiments, a fatty acid comprises 16 or more carbon atom. In some embodiments, a fatty acid comprises 17 or more carbon atoms. In some embodiments, a fatty acid comprises 18 or more carbon atoms. In some embodiments, a fatty acid comprises 19 or more carbon atoms. In some embodiments, a fatty acid comprises 20 or more carbon atoms. In some embodiments, a fatty acid comprises 30 or more carbon atoms.

[1101] In some embodiments, a lipid is palmitic acid. In some embodiments, a lipid is stearic acid or turbinaric acid. In some embodiments, a lipid is stearic acid, in some embodiments, a lipid is turbinaric acid.

[1102] In some embodiments, a lipid comprises an optionally substituted, C₁₀-C₈₀ saturated or partially unsaturated aliphatic group, wherein one or more methylene units are optionally and independently replaced by an optionally substituted group selected from C₁-C₆ alkylene, C₁-C₆ alkenylene, —C≡C—, a C₁-C₆ heteroaliphatic moiety, —C(R′)₂—Cy—, —O—, —S—, —S—S—, —N(R′)—, —C(O)—, —C(S)—, —C(NR′)—, —C(O)N(R′)—, —N(R′)C(O)N(R′)—, —N(R′)C(O)—, —N(R′)C(O)O—, —OC(O)N(R′)—, —S(O)—, —S(O)₂—S(O)₂N(R′)—, —N(R′)S(O)₂—, —SC(O)—, —C(O)S—, —OC(O)—, and —C(O)O—, wherein each variable is independently as defined and described herein.

[1103] In some embodiments, a lipid comprises an optionally substituted C₁₀-C₆₀ saturated or partially unsaturated, aliphatic chain.

[1104] In some embodiments, a lipid comprises an optionally substituted C₁₀-C₆₀ linear, saturated or partially unsaturated, aliphatic chain.

[1105] In some embodiments, a lipid comprises a C₁₀-C₆₀ linear, saturated or partially unsaturated, aliphatic chain, optionally substituted with one or more C₁₋₄ aliphatic group.

[1106] In some embodiments, a lipid comprises an optionally substituted, C₁₀-C₆₀ saturated or partially unsaturated aliphatic group, wherein one or more methylene units are optionally and independently replaced by an optionally substituted group selected from C₁-C₆ alkylene, C₁-C₆ alkenylene, —C≡C—, a C₁-C₆ heteroaliphatic moiety, —C(R′)₂—, —Cy-, —O—, —S—, —S—S—, —N(R′)—, —C(O)—, —C(S)—, —C(NR′)—, —C(O)N(R′)—, —N(R′)C(O)N(R′)—: —N(R′)C(O)—, —N(R′)C(O)O—, —OC(O)N(R′)—, —S(O)—, —S(O)₂—, —S(O)₂N(R′)—, —N(R′)S(O)₂—, —SC(O)—, —C(O)S—, —OC(O)—, and —C(O)O—, wherein each variable is independently as defined and described herein.

[1107] In some embodiments, a lipid comprises an optionally substituted C₁₀-C₆₀ saturated or partially unsaturated, aliphatic chain.

[1108] In some embodiments, a lipid comprises an optionally substituted C₁₀-C₆₀; linear, saturated or partially unsaturated, aliphatic chain.

[1109] In some embodiments, a lipid comprises a C₁₀-C₆₀ linear, saturated or partially unsaturated, aliphatic chain, optionally substituted with one or more C₁₋₄ aliphatic group.

[1110] In some embodiments, a lipid comprises an optionally substituted, C₁₀-C₄₀ saturated or partially unsaturated aliphatic group, wherein one or more methylene units are optionally and independently replaced by an optionally substituted group selected from C₁-C₆ alkylene, C₁-C₆ alkenylene, —C≡C—, a C₁-C₆ heteroaliphatic moiety, —C(R′)₂—, —Cy—, —O—, —S—, —S—S—, —N(R′)—, —C(O)—, —C(S)—, —C(NR′)—C(O)N(R′)—, —N(R′)C(O)N(R′), —N(R′)C(O)—, —N(R′)C(O)O—, —OC(O)N(R′)—, —S(O)—, —S(O)₂N(R′)—, —N(R′)S(O)₂—, —SC(O)—, —C(O)S—, —OC(O)—, and —C(O)O—, wherein each variable is independently as defined and described herein.

[1111] In some embodiments, a lipid comprises an optionally substituted C₁₀-C₆₀ saturated or partially unsaturated, aliphatic chain.

[1112] In some embodiments, a lipid comprises an optionally substituted C₁₀-C₆₀ linear, saturated or partially unsaturated, aliphatic chain.

[1113] In some embodiments, a lipid comprises a C₁₀-C₆₀ linear, saturated or partially unsaturated, aliphatic chain, optionally substituted with one or more C₁₋₄ aliphatic group.

[1114] In some embodiments, a lipid comprises an unsubstituted C₁₀-C₈₀ linear, saturated or partially unsaturated, aliphatic chain.

[1115] In some embodiments, a lipid comprises no more than one optionally substituted C₁₀-C₆₀ linear, saturated or partially unsaturated, aliphatic chain.

[1116] In some embodiments, a lipid comprises two or more optionally substituted C₁₀-C₆₀ linear, saturated or partially unsaturated, aliphatic chain.

[1117] In some embodiments, a lipid comprises an unsubstituted C₁₀-C₆₀ linear, saturated or partially unsaturated, aliphatic chain.

[1118] In some embodiments, a lipid comprises no more than one optionally substituted C₁₀-C₆₀ linear, saturated or partially unsaturated, aliphatic chain.

[1119] In some embodiments, a lipid comprises two or more optionally substituted C₁₀-C₆₀ linear, saturated or partially unsaturated, aliphatic chain.

[1120] In some embodiments, a lipid comprises an unsubstituted C₁₀-C₄₀ linear, saturated or partially unsaturated, aliphatic chain.

[1121] In some embodiments, a lipid comprises no more than one optionally substituted C₁₀-C₆₀ linear, saturated or partially unsaturated, aliphatic chain.

[1122] In some embodiments, a lipid comprises two or more optionally substituted C₁₀-C₆₀ linear, saturated or partially unsaturated, aliphatic chain.

[1123] In some embodiments, a lipid comprises a C₁₀-C₄₀ linear, saturated or partially unsaturated, aliphatic chain.

[1124] In some embodiments, a lipid comprises a C₁₀-C₃₁ linear, saturated or partially unsaturated, aliphatic chain.

[1125] In some embodiments, a lipid comprises a C₁₀-C₂₀ linear, saturated or partially unsaturated, aliphatic chain.

[1126] In some embodiments, a lipid comprises a C₁₀-C₁₆ linear, saturated or partially unsaturated, aliphatic chain.

[1127] In some embodiments, a lipid comprises a C₂-C₁₆ linear, saturated or partially unsaturated, aliphatic chain.

[1128] In some embodiments, a lipid comprises a C₁₄-C₁₆ linear, saturated or partially unsaturated, aliphatic chain.

[1129] In some embodiments, a lipid comprises a C₁₀-C₄₀ linear, saturated or partially unsaturated, aliphatic chain, optionally substituted with one or more C₁₋₄ aliphatic group.

[1130] In some embodiments, a lipid is selected from the group consisting of: lauric acid, myristic acid, palmitic acid, stearic acid, oleic acid, linoleic acid, alpha-linolenic acid, gamma-linolenic acid, docosahexaenoic acid (DHA or cis-DHA), turbinaric acid and dilinoleyl.

[1131] In some embodiments, a lipid is not conjugated to the oligonucleotide.

[1132] In some embodiments, a lipid is conjugated to the oligonucleotide.

[1133] In some embodiments, a lipid is conjugated to the oligonucleotide with a linker. In some embodiments, a linker has the structure of -L-.

[1134] In some embodiments, a targeting moiety is conjugated to a PNPLA3 oligonucleotide. In some embodiments, a provided oligonucleotide comprises one or more targeting moieties. In some embodiments, a targeting moiety is conjugated via a linker.

[1135] In some embodiments, a provided oligonucleotide comprises one or more lipid moieties, and one or more targeting moieties.

[1136] In some embodiments, a provided single-stranded RNAi agent comprises a lipid. In some embodiments, a provided single-stranded RNAi agent comprises a lipid moiety, wherein the lipid is C₁₆ linear. In some embodiments, a provided single-stranded RNAi agent comprises a lipid, wherein the lipid is palmitic acid.

[1137] In some embodiments, a provided single-stranded RNAi agent comprises a lipid conjugated to a base. In some embodiments, a provided single-stranded RNAi agent comprises a lipid, wherein the lipid is C₁₆ linear conjugated to a base. In some embodiments, a provided single-stranded RNAi agent comprises a lipid, wherein the lipid is palmitic acid conjugated to a base.

[1138] In some embodiments, the present disclosure pertains to a chirally controlled oligonucleotide composition, wherein the composition further comprises a lipid. In some embodiments, a lipid is stearic acid or turbinaric acid. In some embodiments, a lipid is conjugated to the oligonucleotide.

[1139] In some embodiments, conjugation of a lipid to a PNPLA3 oligonucleotide improves at least one property of the oligonucleotide. In some embodiments, the property is increased activity (e.g., increased ability to mediate single-stranded RNA interference), or improved distribution to a tissue. In some embodiments, lipid conjugation improves activity. In some embodiments, lipid conjugation improves deliveries to one or more target tissues. In some embodiments, the tissue is muscle tissue. In some embodiments, the tissue is skeletal muscle, gastrocnemius, triceps, heart or diaphragm.

[1140] In some embodiments, a lipid comprises an optionally substituted, C10-C80 saturated or partially unsaturated aliphatic group, wherein one or more methylene units are optionally and independently replaced by an optionally substituted group selected from C1-C6 alkylene, C1-C6 alkenylene, a C1-C6 heteroaliphatic moiety, —C(R)₂—, —Cy-, —O—, —S—, —S—S—, —N(R)—, —C(O)—, —C(S)—, —C(NR)—, —C(O)N(R)—, —N(R)C(O)N(R), —N(R)C(O)—, —N(R)C(O)O—, —OC(O)N(R)—, —S(O)—, —S(O)₂—, —S(O)₂N(R)—, —N(R)S(O)₂—, —SC(O)—, —C(O)S—, —OC(O)—, and —C(O)O—, wherein each variable is independently as defined and described herein. In some embodiments, a lipid comprises an optionally substituted C10-C60 saturated or partially unsaturated, aliphatic chain. In some embodiments, a lipid comprises an optionally substituted C10-C60 linear, saturated or partially unsaturated, aliphatic chain. In some embodiments, a lipid comprises a C10-C60 linear, saturated or partially unsaturated, aliphatic chain, optionally substituted with one or more C14 aliphatic group. In some embodiments, a lipid comprises an optionally substituted, C10-C60 saturated or partially unsaturated aliphatic group, wherein one or more methylene units are optionally and independently replaced by an optionally substituted group selected from C1-C6 alkylene, C1-C6 alkenylene, a C1-C6 heteroaliphatic moiety, —C(R)₂, —Cy-, —O—, —S—, —S—S—, —N(R)—, —C(O)—. —C(S)—, —C(NR)—, —C(O)N(R)—, —N(R)C(O)N(R), —N(R)C(O)—, —N(R)C(O)O—, —OC(O)N(R)—, —S(O)—, —S(O)₂—, —S(O)₂N(R)—, —N(R)S(O)₂—, —SC(O)—, —C(O)S—, —OC(O)—, and —C(O)O—, wherein each variable is independently as defined and described herein. In some embodiments, a lipid comprises an optionally substituted C10-C60 saturated or partially unsaturated, aliphatic chain. In some embodiments, a lipid comprises an optionally substituted C10-C60 linear, saturated or partially unsaturated, aliphatic chain. In some embodiments, a lipid comprises a C10-C60 linear, saturated or partially unsaturated, aliphatic chain, optionally substituted with one or more C1-4 aliphatic group. In some embodiments, a lipid comprises an optionally substituted, C10-C40 saturated or partially unsaturated aliphatic group, wherein one or more methylene units are optionally and independently replaced by an optionally substituted group selected from C1-C6 alkylene, C1-C6 alkenylene, a C1-C6 heteroaliphatic moiety, —C(R)₂, —Cy-, —O—, —S—, —S—S—, —N(R)—, —C(O)—, —C(S)—, —C(NR)—, —C(O)N(R)—, —N(R)C(O)N(R). —N(R)C(O)—, —N(R)C(O)O—, —OC(O)N(R)—, —S(O)—, —S(O)₂—, —S(O)₂N(R)—, —N(R)S(O)₂—, —SC(O)—, —C(O)S—, —OC(O)—, and —C(O)O—, wherein each variable is independently as defined and described herein. In some embodiments, a lipid comprises an optionally substituted C10-C60 saturated or partially unsaturated, aliphatic chain. In some embodiments, a lipid comprises an optionally substituted C10-C60 linear, saturated or partially unsaturated, aliphatic chain. In some embodiments, a lipid comprises a C10-C60 linear, saturated or partially unsaturated, aliphatic chain, optionally substituted with one or more C1-4 aliphatic group. In some embodiments, a lipid comprises an unsubstituted C10-C80 linear, saturated or partially unsaturated, aliphatic chain. In some embodiments, a lipid comprises no more than one optionally substituted C10-C60 linear, saturated or partially unsaturated, aliphatic chain. In some embodiments, a lipid comprises two or more optionally substituted C10-C60 linear, saturated or partially unsaturated, aliphatic chain. In some embodiments, a lipid comprises an unsubstituted C10-C60 linear, saturated or partially unsaturated, aliphatic chain. In some embodiments, a lipid comprises no more than one optionally substituted C10-C60 linear, saturated or partially unsaturated, aliphatic chain. In some embodiments, a lipid comprises two or more optionally substituted C10-C60 linear, saturated or partially unsaturated, aliphatic chain. In some embodiments, a lipid comprises an unsubstituted C10-C40 linear, saturated or partially unsaturated, aliphatic chain. In some embodiments, a lipid comprises no more than one optionally substituted C10-C60 linear, saturated or partially unsaturated, aliphatic chain. In some embodiments, a lipid comprises two or more optionally substituted C10-C60 linear, saturated or partially unsaturated, aliphatic chain. In some embodiments, a lipid comprises a C10-C40 linear, saturated or partially unsaturated, aliphatic chain. In some embodiments, a lipid comprises a C10-C40 linear, saturated or partially unsaturated, aliphatic chain, optionally substituted with one or more C1-4 aliphatic group. In some embodiments, the lipid is selected from the group consisting of: lauric acid, myristic acid, palmitic acid, stearic acid, oleic acid, linoleic acid, alpha linolenic acid, gamma-linolenic acid, docosahexaenoic acid (cis-DHA), turbinaric acid and dilinoleyl. In some embodiments, the lipid is not conjugated to the oligonucleotide. In some embodiments, the lipid is conjugated to the oligonucleotide.

[1141] In some embodiments, conjugation of a lipid to a PNPLA3 oligonucleotide surprisingly improves at least one property of the oligonucleotide. In some embodiments, the property is increased activity (e.g., increased ability to mediate single-stranded RNA interference), or improved distribution to a tissue. In some embodiments, the tissue is muscle tissue. In some embodiments, the tissue is skeletal muscle, gastrocnemius, triceps, heart or diaphragm. In some embodiments, oligonucleotides comprising lipid moieties form, for example, micelles. In some embodiments, example improved properties are demonstrated, e.g., in one or more of the Figures.

[1142] In some embodiments, when assaying example oligonucleotides in mice, tested oligonucleotides are intravenous injected via tail vein in male C57BL/10ScSnDMDmdx mice (4-5 weeks old), at tested amounts, e.g., 10 mg/kg, 30 mg/kg, etc. In some embodiments, tissues are harvested at tested times, e.g., on Day, e.g., 2, 7 and/or 14, etc., after injection, in some embodiments, fresh frozen in liquid nitrogen and stored in −80° C. until analysis.

[1143] Various assays can be used to assess oligonucleotide levels in accordance with the present disclosure. In some embodiments, hybrid-ELISA is used to quantify oligonucleotide levels in tissues using test article serial dilution as standard curve: for example, in an example procedure, malefic anhydride activated 96 well plate (Pierce 15110) was coated with 50 1 of capture probe at 500 nM in 2.5% NaHCO₃ (Gibco, 25080-094) for 2 hours at 37° C. The plate was then washed 3 times with PBST (PBS+0.1% Teen-20), and blocked with 5% fat free milk-PBST at 37° C. for 1 hour. Test article oligonucleotide was serial diluted into matrix. This standard together with original samples were diluted with lysis buffer (4 M Guanidine; 0.33% N-Lauryl Sarcosine; 25 mM Sodium Citrate; 10 mM DTI) so that oligonucleolide amount in all samples is less than 100 ng/ml. 20 1 of diluted samples were mixed with 180 1 of 333 nM detection probe diluted in PBST, then denatured in PCR machine (65° C., 10 min, 95° C., 15 min, 4° C.). 50 1 of denatured samples were distributed in blocked ELISA plate in triplicates, and incubated overnight at 4° C. After 3 washes of PBST, 1:2000 streptavidin-AP in PBST was added, 50 1 per well and incubated at room temperature for 1 hour. After extensive wash with PBST, 100 1 of AttoPhos (Promega S1000) was added, incubated at room temperature in dark for 10 min and read on plate reader (Molecular Device, M5) fluorescence channel: Ex435 nm, Em555 nm. Oligonucleotides in samples were calculated according to standard curve by 4-parameter regression.

[1144] As described and demonstrated in the present disclosure, in some embodiments, lipid conjugation improves delivery to a tissue. In some embodiments, lipid conjugation improves delivery to muscle. In some embodiments, lipid conjugation comprises conjugation with a fatty acid. In some embodiments, oligonucleotides are conjugated with turbinaric acid. In some embodiments, conjugation with turbinaric acid is particularly effective in improving oligonucleotide delivery to muscle.

[1145] In some embodiments, provided oligonucleotides are stable in both plasma and tissue homogenates.

[1146] In some embodiments, a provided single-stranded RNAi agent comprises a lipid conjugated at position 9 or 11 (counting from the 5′-end). In some embodiments, a provided single-stranded RNAi agent comprises a lipid, wherein the lipid is C₁₆ linear conjugated at position 9 or 11 (counting from the 5′-end). In some embodiments, a provided single-stranded RNAi agent comprises a lipid, wherein the lipid is palmitic acid conjugated at position 9 or 11 (counting from the 5′-end).

[1147] In some embodiments, a provided single-stranded RNAi agent comprises a lipid conjugated to a base at position 9 or 11 (counting from the 5′-end). In some embodiments, a provided single-stranded RNAi agent comprises a lipid, wherein the lipid is C₁₆ linear conjugated to a base at position 9 or 11 (counting from the 5′-end). In some embodiments, a provided single-stranded RNAi agent comprises a lipid, wherein the lipid is palmitic acid conjugated to a base at position 9 or 11 (counting from the 5′-end).

[1148] In some embodiments, a provided single-stranded RNAi agent comprises a lipid conjugated to a U base at position 9 or 11 (counting from the 5′-end), in some embodiments, a provided single-stranded RNAi agent comprises a lipid, wherein the lipid is C₁₆ linear conjugated to a U base at position 9 or 11 (counting from the 5′-end). In some embodiments, a provided single-stranded RNAi agent comprises a lipid, wherein the lipid is palmitic acid conjugated to a U base at position 9 or 11 (counting from the 5′-end).

[1149] In some embodiments, a provided single-stranded RNAi comprises a structure of ImU, or 5′-lipid-2′OMeU.

[chemical structure]

[1150] In some embodiments, a PNPLA3 oligonucleotide, a PNPLA3 oligonucleotide that directs RNA interference, a PNPLA3 oligonucleotide that directs RNase H-mediated knockdown, or a PNPLA3 oligonucleotide that directs both RNA interference and RNase H-mediated knockdown can comprise any additional chemical moiety, including but not limited to, a lipid, described in any of U.S. Pat. Nos. 5,614,503; 5,780,009; 6,074,863; 6,258,581; 6,489,117; 6,677,445; 6,828,435; 6,846,921; 7,416,849; 7,494,982; 7,981,871; 8,106,022; 8,148,344; 8,318,508; 8,389,707; 8,450,467; 8,507,455; 8,703,731; 8,828,956; 8,901,046; 9,107,904; 9,352,048; 9,370,581; 9,370,582; 9,387,257; 9,388,415; 9,388,416; 9,393,316; and 9,404,112.

[1151] Optional additional chemical moieties conjugated to a PNPLA3 oligonucleotide: a carbohydrate moiety or a bicyclic ketal, including but not limited to, a GalNAc moiety

[1152] In some embodiments, provided oligonucleotides or oligonucleotide compositions comprise one or more carbohydrates or carbohydrate moieties or bicyclic ketal moieties. In some embodiments, a carbohydrate moiety is a carbohydrate. In some embodiments, a carbohydrate moiety is or comprises a carbohydrate which is conjugated directly or indirectly to a PNPLA3 oligonucleotide. In some embodiments, carbohydrate moieties facilitate targeted delivery of oligonucleotides to desired locations, e.g., cells, tissues, organs, etc. In some embodiments, provided carbohydrate moieties facilitate delivery to liver. As appreciated by a personal having ordinary skill in the art, various carbohydrate moieties are described in the literature and can be utilized in accordance with the present disclosure.

[1153] Carbohydrate moieties can be incorporated into oligonucleotides at various locations, for example, sugar units, internucleotidic linkage units, nucleobase units, etc., optionally through one or more bivalent or multivalent (which can be used to connect two or more carbohydrate moieties to oligonucleotides) linkers. In some embodiments, the present disclosure provides technologies for carbohydrate incorporation into oligonucleotides. In some embodiments, the present disclosure provides technologies for incorporating carbohydrate moieties, optionally through one or more linkers, at nucleobase units, as alternative and/or addition to incorporation at internucleotidic linkages and/or sugar units, thereby providing enormous flexibility and/or improved properties and/or activities. In some embodiments, a provided oligonucleotide comprises at least one carbohydrate moiety, optionally through a linker, incorporated into the oligonucleotide at a nucleobase unit.

[1154] In some embodiments, a linker is L^{M}, wherein L^{M} is a covalent bond, or a bivalent or multivalent, optionally substituted, linear or branched group selected from a C₁₋₁₀₀ aliphatic group and a C₁₋₁₀₀ heteroaliphatic group having 1-30 heteroatoms independently selected from oxygen, nitrogen, sulfur, phosphorus, boron and silicon, wherein one or more methylene units are optionally and independently replaced with C₁₋₆ alkylene, C₁₋₆ alkenylene, —C≡C— —C(R′)₂, —O—, —S—, —S—S—, —C(S)—, —C(NR′)—, —C(O)N(R) N(R′)C(O)N(R′)—, —N(R′)C(O)O—, —S(O)—, —S(O)₂—, —S(O)₂N(R′)—, —C(O)S—, —C(O)O—, —P(O)(OR′)—, —P(O)(SR¹)—, —P(O)(R′)—, —P(O)(NR′)—, —P(S)(OR′)—, —P(S)(SR¹)—, —P(S)(R′)—, —P(S)(NR′)—, —P(R′)—, —P(OR′)—, —P(SR¹)—, —P(NR′)—, —P(OR′)[B(R′)₃]—, —OP(O)(OR′)O—, —OP(O)(SR¹)O—, —OP(O)(R′)O—, —OP(O)(NR′)O—, —OP(OR′)O, —OP(SR¹)O—, —OP(NR′)O—, —OP(R′)O—, or —OP(OR′)[B(R′)₃]O—; and one or more carbon atoms am optionally and independently replaced with Cy. In some embodiments, L^{M} is bivalent. In some embodiments, L^{M} is multivalent, in some embodiments. L^{M} is

[chemical structure]

wherein L^{M} is directly bond to a nucleobase, for example, as in:

[chemical structure]

In some embodiments, L^{M} is

[chemical structure]

In some embodiments, L^{M} is

[chemical structure]

In some embodiments, L^{M} is

[chemical structure]

In some embodiments, L^{M} is

[chemical structure]

[1155] In some embodiments, a carbohydrate moiety or bicyclic ketal or bicyclic ketal moiety is R^{CD}, wherein R^{CD} is an optionally substituted, linear or branched group selected from a C₁₋₁₀₀ aliphatic group and a C₁₋₁₀₀ heteroaliphatic group having 1-30 heteroatoms independently selected from oxygen, nitrogen, sulfur, phosphorus, boron and silicon, wherein one or more methylene units are optionally and independently replaced with C₁₋₆ alkylene, C₁₋₆ alkenylene, —C≡C—, —C(R′)₂—, —O—, —S—, —S—S—, —N(R′)—, —C(O)—, —C(S)—, —C(NR′)—, —C(O)N(R′)—, —N(R′)C(O)N(R′)—, —N(R′)C(O)O— —S(O)—, —S(O)₂—, —S(O)₂N(R)—, —C(O)S—, —C(O)O—, —P(O)(OR′)—, —P(O)(SR¹)—, —P(O)(R′)—. —P(O)(NR′)—P(S)(OR′)—, —P(S)(SR¹)—, —P(S)(R′)—, —P(S)(NR′)—, —P(R′)—, —P(OR′)—, —P(SR¹)—, —P(OR′)[B(R′)₃]—, —OP(O)(OR′)O—, —OP(O)(SR¹)O—, —OP(O)(R′)O—, —OP(O)(NR′)O—, —OP(OR′)O—, —OP(SR¹)O—, —OP(NR′)O—, —OP(R′)O—, or —OP(OR′)[B(R′)₃]O—; and one or more carbon atoms am optionally and independently replaced with Cy^{L}. In some embodiments, R^{CD} is an optionally substituted, linear or branched group selected from a C₁₋₁₀₀ aliphatic group and a C₁₋₁₀₀ heteroaliphatic group having 1-30 heteroatoms independently selected from oxygen, nitrogen, sulfur, phosphorus, boron and silicon, wherein one or more methylene units are optionally and independently replaced with C alkylene, C₁₋₆ alkenylene, —O—, —S—, —S—S—, —N(R′)—, —C(O)—, —C(S)—, —C(O)N(R′))—, —N(R′)C(O)N(R′)—, —N(R′)C(O)O—, —S(O)—, —S(O)₂—, —S(O)₂N(R′)—, —C(O)S—, —C(O)O—, —P(O)(OR′)—, —P(O)(SR¹)—, —P(O)(R′)—, —P(O)(NR′)—, —P(S)(OR′)—, —P(S)(SR¹)—, —P(S)(R′)—, —P(S)(NR′)—, —P(R′)—, —P(OR′)—, —P(SR¹)—, —P(NR′)—, —P(OR′)[B(R′)₃]—, — . . . OP(O)(OR′)O—, —OP(O)(SR¹)O—, —OP(O)(R′)O—, —OP(O)(NR′)O—. —OP(OR′)O—, —OP(SR¹)O—, —OP(NR′)O—, —OP(R′)O—, or —OP(OR′)[B(R′)₃]O—; and one or more carbon atoms are independently replaced with a tetravalent monosaccharide, disaccharide or poly saccharide moiety. In some embodiments, R^{CD} is an optionally substituted, linear or branched group selected from a C₁₋₁₀₀ aliphatic group and a C₁₋₄₀₀ heteroaliphatic group having 1-30 heteroatoms independently selected from oxygen, nitrogen, sulfur, phosphorus, boron and silicon, wherein one or more methylene units are optionally and independently replaced with C₁₋₆ alkylene, C₁₋₆ alkenylene, —C≡C—, —C(R′)₂—, —O—, —S—, —S—S—, ═N(R′)—, —C(O)—, —C(S)—, —C(NR′)—, —C(O)N(R′)—, N(R′)C(O)N(R′)—, N(R′)C(O)O—, —S(O)—, —S(O)₂—, —S(O)₂N(R′)—, —C(O)S⁻, —C(O)O—, —P(O)(OR′)—, —P(O)(SR¹)—, —P(O)(R′)—, —P(O)(NR′)—P(S)(OR′)—P(S)(SR¹)—, —P(S)(R′)—, —P(S)(NR′)—, —P(NR′)—; —P(OR′)[B(R′)₃]—, —OP(O)(OR′)O—, —OP(O)(SR¹)O—, —OP(O)(R′)O—, —OP(O)(NR′)O—, —OP(OR′)O—OP(SR¹)O—, —OP(NR′)O—, —OP(R′)O—, or —OP(OR′)[B(R′)₃]O—; and one or more carbon atoms are independently replaced with a tetravalent GalNac moiety, or a tetravalent moiety of a GalNac derivative.

[1156] In some embodiments, R^{CD} is optionally substituted

[chemical structure]

In some embodiments, R¹ is —C(O)R. In some embodiments, R^{CD} is a monosaccharide moiety. In some embodiments, R^{CD} is a monovalent GalNac moiety. In some embodiments, R^{CD} is

[chemical structure]

In some embodiments, R^{CD} is optionally substituted

[chemical structure]

In some embodiments, R^{CD} is optionally substituted

[chemical structure]

In some embodiments, R¹ is —C(O)R. In some embodiments, R^{CD} is optionally substituted

[chemical structure]

In some embodiments, R^{CD} is a disaccharide moiety. In some embodiments, R^{CD} is a polysaccharide moiety.

[1157] In some embodiments, R^{CD} has the structure of R^{G}-L-, wherein R^{G} is H, or an optionally substituted group selected from C₃-C₂₀ cycloaliphatic, and 3-20 membered heterocyclyl having 1-10 heteroatoms independently selected from oxygen, nitrogen, sulfur, phosphorus, boron and silicon. In some embodiments, R^{CD} has the structure of R^{G}-L-, wherein R^{G} is an optionally substituted group selected from C₃-C₂₀ cycloaliphatic, and 3-20 membered heterocyclyl having 1-10 heteroatoms independently selected from oxygen, nitrogen, sulfur, phosphorus, boron and silicon. In some embodiments, R^{D} has the structure of R^{G}-L-, wherein R^{G} is an optionally substituted group selected from C₃-C₂₀ cycloaliphatic, and 3-20 membered heterocyclyl having 1-10 heteroatoms independently selected from oxygen, nitrogen, sulfur, phosphorus, boron and silicon, wherein at least one heteroatom is oxygen. In some embodiments, R^{G} is substituted, and at least one substitute of each R^{G} is bonded to R^{G} through an oxygen atom. In some embodiments, R^{G} is substituted, and at least one substitute of each R^{G} is bonded to R^{G} through a nitrogen atom. In some embodiments, R^{G} is independently substituted, and each carbon atom of each R^{G} is independently bonded to a substituent through an oxygen or nitrogen atom. In some embodiments, R^{G} is independently substituted, and each carbon atom of each R^{G} is independently bonded to a substituent through an oxygen or nitrogen atom. In some embodiments, R^{G} is optionally substituted 3-20 membered heterocyclyl having 140 oxygen atoms. In some embodiments, R^{G} is optionally substituted 3-6 membered heterocyclyl having one oxygen atom, in some embodiments, each R^{G} is independently optionally substituted 3-20 membered heterocyclyl having 1-10 oxygen atoms. In some embodiments, R^{G} is independently optionally substituted 3-6 membered heterocyclyl having one oxygen atom. In some embodiments, each carbon of the heterocyclyl ring of R^{G} is independently boned to an oxygen or nitrogen atom. In some embodiments, two or more carbon atoms of the heterocyclyl ring of R^{G} are independently boned to an oxygen or nitrogen atom. In some embodiments, two or more carbon atoms of the heterocyclyl ring of R^{G} are independently boned to an oxygen or nitrogen atom. In some embodiments, three or more carbon atoms of the heterocyclyl ring of R^{G} are independently boned to an oxygen or nitrogen atom. In some embodiments, four or more carbon atoms of the heterocycyl ring of R^{G} are independently boned to an oxygen or nitrogen atom. In some embodiments, five or more carbon atoms of the heterocyclyl ring of R^{G} are independently boned to an oxygen or nitrogen atom, in some embodiments, two or more carbon atoms of the heterocyclyl ring of R^{G} are independently boned to an oxygen atom. In some embodiments, three or more carbon atoms of the heterocyclyl ring of R^{G} are independently boned to an oxygen atom. In some embodiments, four or more carbon atoms of the heterocyclyl ring of R^{G} are independently boned to an oxygen atom. In some embodiments, five or more carbon atoms of the heterocyclyl ring of R^{G} are independently boned to an oxygen atom. In some embodiments, R^{G}—H is C₃₋₂₀ polyol comprising a-CH₀ or—C(O)— group.

[1158] In some embodiments, R^{CD} has the structure of R^{G}-L-, wherein R^{G} is —H, or a substituted group selected from C₃-C₂₀ cycloaliphatic, and 3-20 membered heterocyclyl having 1-10 heteroatoms independently selected from oxygen, nitrogen, sulfur, phosphorus, boron and silicon, wherein 1-20 of the substituents are R groups. In some embodiments, R^{CD} has the structure of R^{G}-L-, wherein R^{G} is —H, or a substituted group selected from C₃-C₂₀ cycloaliphatic, and 3-20 membered heterocyclyl having 1-10 heteroatoms independently selected from oxygen, nitrogen, sulfur, phosphorus, boron and silicon, wherein 1-20 of the substituents are —OR or —N(R)₂ groups. In some embodiments, R^{CD} has the structure R^{G}— L-, wherein R^{G} is —H, or a substituted group selected from C₃-C₂₀ cycloaliphatic, and 3-20 membered heterocyclyl having 1-10 heteroatoms independently selected from oxygen, nitrogen, sulfur, phosphorus, boron and silicon, wherein 1-20 of the substituents are —OH and —N(R)₂. In some embodiments, R^{CD} has the structure of R^{G}-L-, wherein R^{G} is —H, or a substituted group selected from C₃-C₂₀ cycloaliphatic, and 3-20 membered heterocyclyl having 1-10 heteroatoms independently selected from oxygen, nitrogen, sulfur, phosphorus, boron and silicon, wherein 1-20 of the substituents are —OH and —NHR, in some embodiments, R^{CD} has the structure of R^{G}-L-, wherein R^{G} is —H, or a substituted group selected from C₃-C₂₀ cycloaliphatic, and 3-20 membered heterocyclyl having 1-10 heteroatoms independently selected from oxygen, nitrogen, sulfur, phosphorus, boron and silicon, wherein 1-20 of the substituents are —OH and

[1159] In some embodiments, R^{G} is substituted 3-20 membered heterocyclyl having 1-10 heteroatoms independently selected from oxygen, nitrogen, sulfur, phosphorus, boron and silicon. In some embodiments, R^{G} is substituted 3-20 membered heterocyclyl having 1-10 heteroatoms independently selected from oxygen and nitrogen. In some embodiments, R^{G} is substituted 3-20 membered heterocyclyl having 1-10 oxygen. In some embodiments, R^{G} is substituted

[chemical structure]

In some embodiments, R^{G} is substituted U

[chemical structure]

In some embodiments, R^{G} is substituted

[chemical structure]

[1160] In some embodiments, R^{G} is

[chemical structure]

wherein each variable is independently as described in the present disclosure. In some embodiments, t is 1, 2, 3, 4, 5, 6, 7, 8, 9, or 10. In some embodiments, t is at least 1, 2, 3, 4, 5, 6, 7, 8, 9, or 10. In some embodiments, t is at least 1. In some embodiments, t is at least 2. In some embodiments, t is at least 3. In some embodiments, t is at least 4. In some embodiments, t is at least 5. In some embodiments, t is at least 6. In some embodiments, each R^{1s} is independently —OR¹ or —N(R′)₂. In some embodiments, each R¹ is independently —C(O)R, in some embodiments, each R^{1s} is independently —OR¹ or —NHR′. In some embodiments, each R^{1s} is independently —OH or —NHR′. In some embodiments, each R^{1s} is independently —OH or —NHC(O)R. In some embodiments, Ring A is optionally substituted

[chemical structure]

In some embodiments, Ring A is optionally substituted

[chemical structure]

In some embodiments, Ring A is optionally substituted

[chemical structure]

[1161] In some embodiments, R^{G} is

[chemical structure]

wherein each variable is independently as described in the present disclosure (i.e., R^{G}—H is

[chemical structure]

In some embodiments, at least 1, 2, 3, 4, 5, or 6 of R^{1s}, R^{2s}, R^{3s}, R^{4s} and R^{5s} are independently —OR¹ or, N(R′)₂. In some embodiments, at least 1, 2, 3, 4, 5, or 6 of R^{1s}, R^{2s}, R^{3s}, R^{4s} and R^{5s} are independently —OR¹ or —NHR′, in some embodiments, at least 1, 2, 3, 4, 5, or 6 of R^{1s}, R^{2s}, R^{3s}, R^{4s} and R^{5s} are independently —OH or —NHR′. In some embodiments, at least 1, 2, 3, 4, 5, or 6 of R^{1s}, R^{2s}, R^{3s}, R^{4s} and R^{5s} are independently —OH or NHC(O)R. In some embodiments, at least 1, 2, 3, 4, 5, or 6 of R^{1s}, R^{2s}, R^{3s}, R^{4s} and R^{5s} are —OH.

[1162] In some embodiments, each ring carbon atom of the cycloaliphatic or heterocyclic ring of RV is independently substituted. In some embodiments, no more than 1, 2, 3, 4, 5, 6, 7, 8, 9, or 10 ring carbon atoms of the cycloaliphatic or heterocyclic ring of R^{G} are not substituted. In some embodiments, no more than 1 ring carbon atom is not substituted. In some embodiments, no more than 2 ring carbon atoms are not substituted. In some embodiments, no more than 3 ring carbon atoms are not substituted, in some embodiments, no more than 4 ring carbon atoms are not substituted. In some embodiments, no more than 5 ring carbon atoms are not substituted. In some embodiments, no more than 6 ring carbon atoms are not substituted. In some embodiments, no more than 7 ring carbon atoms are not substituted. In some embodiments, no more than 8 ring carbon atoms are not substituted. In some embodiments, no more than 9 ring carbon atoms are not substituted. In some embodiments, no more than 10 ring carbon atoms are not substituted. In some embodiments, no more than 1, 2, 3, 4, 5, 6, 7, 8, 9, or 10 ring carbon atoms of the cycloaliphatic or heterocyclic ring of R^{G} are not substituted with —OH or —N(R′)₂. In some embodiments, no more than 1 ring carbon atom is not substituted with —OH or N(R′)₂. In some embodiments, no more than 2 ring carbon atoms are not substituted with —OH or —N(R′)₂. In some embodiments, no more than 3 ring carbon atoms are not substituted with —OH or —N(R′)₂. In some embodiments, no more than 4 ring carbon atoms are not substituted with —OH or N(R′)₂. In some embodiments, no more than 5 ring carbon atoms are not substituted with —OH or —N(R′)₂. In some embodiments, no more than 6 ring carbon atoms are not substituted with —OH or N(R′)₂, in some embodiments, no more than 7 ring carbon atoms are not substituted with —OH or —N(R′)₂. In some embodiments, no more than 8 ring carbon atoms are not substituted with —OH or —N(R′)₂. In some embodiments, no more than 9 ring carbon atoms are not substituted with —OH or —N(R′)₂. In some embodiments, no more than 10 ring carbon atoms are not substituted with —OH or N(R′)₂. In some embodiments, no more than 1, 2, 3, 4, 5, 6, 7, 8, 9, or 10 ring carbon atoms of the cycloaliphatic or heterocyclic ring of R^{G} are not substituted with —OH. In some embodiments, no more than 1 ring carbon atom is not substituted with —OH, in some embodiments, no more than 2 ring carbon atoms are not substituted with —OH. In some embodiments, no more than 3 ring carbon atoms are not substituted with —OFT. In some embodiments, no more than 4 ring carbon atoms are not substituted with —OH. In some embodiments, no more than 5 ring carbon atoms are not substituted with —OH, in some embodiments, no more than 6 ring carbon atoms are not substituted with —OH. In some embodiments, no more than 7 ring carbon atoms are not substituted with —OH. In some embodiments, no more than 8 ring carbon atoms are not substituted with —OH. In some embodiments, no more than 9 ring carbon atoms are not substituted with —OH. In some embodiments, no more than 10 ring carbon atoms are not substituted with —OH. In some embodiments, at least 10%, 20%, 30%, 40%, 50%, 60%, 70%, 80%, 90%, or 95% percent of the ring carbon atoms of the cycloaliphatic or heterocyclic ring of R^{∘} are substituted with —OH or —N(R′)₂. In some embodiments, no more than 10%, 20%, 30%, 40%, 50%, 60%, 70%, 80%, 90%, or 95% of the ring carbon atoms of the cycloaliphatic or heterocyclic ring of R^{G} are not substituted with —OH. In some embodiments, no more than 10% of the ring carbon atoms are not substituted with —OH. In some embodiments, no more than 20% of the ring carbon atoms are not substituted with —OFT. In some embodiments, each ring carbon atom of the cycloaliphatic or heterocyclic ring of RV is independently substituted. In some embodiments, at least 1, 2, 3, 4, 5, 6, 7, 8, 9, or 10 ring carbon atoms of the cycloaliphatic or heterocyclic ring of R^{G} are substituted. In some embodiments, at least 0.1 ring carbon atom is substituted, in some embodiments, at least 2 ring carbon atoms are substituted. In some embodiments, at least 3 ring carbon atoms are substituted. In some embodiments, at least 4 ring carbon atoms are substituted. In some embodiments, at least 5 ring carbon atoms are substituted. In some embodiments, at least 6 ring carbon atoms are substituted. In some embodiments, at least 7 ring carbon atoms are substituted. In some embodiments, at least 8 ring carbon atoms are substituted. In some embodiments, at least 9 ring carbon atoms are substituted. In some embodiments, at least 10 ring carbon atoms are substituted. In some embodiments, at least 1, 2, 3, 4, 5, 6, 7, 8, 9, or 10 ring carbon atoms of the cycloaliphatic or heterocyclic ring of R^{G} are substituted with —OH or —N(R′)₂. In some embodiments, at least 1 ring carbon atom is substituted with —OH or —N(R′)₂. In some embodiments, at least 2 ring carbon atoms are substituted with —OH or —N(R′)₂. In some embodiments, at least 3 ring carbon atoms are substituted with —OH or —N(R′)₂, in some embodiments, at least 4 ring carbon atoms are substituted with —OH or —N(R′)₂. In some embodiments, at least 5 ring carbon atoms are substituted with —OH or N(R′)₂. In some embodiments, at least 6 ring carbon atoms are substituted with —OH or —N(R′)₂. In some embodiments, at least 7 ring carbon atoms are substituted with —OH or N(R′)₂. In some embodiments, at least 8 ring carbon atoms are substituted with-OH or —N(R′)₂. In some embodiments, at least 9 ring carbon atoms are substituted with —OH or —N(R′)₂, in some embodiments, at least 10 ring carbon atoms are substituted with —OH or —N(R′)₂. In some embodiments, at least 1, 2, 3, 4, 5, 6, 7, 8, 9, or 10 ring carbon atoms of the cycloaliphatic or heterocyclic ring of R^{G} are substituted with —OH. In some embodiments, at least 1 ring carbon atom is substituted with —OH. In some embodiments, at least 2 ring carbon atoms are substituted with —OH. In some embodiments, at least 3 ring carbon atoms are substituted with —OH. In some embodiments, at least 4 ring carbon atoms are substituted with —OH. In some embodiments, at least ring carbon atoms are substituted with —OH. In some embodiments, at least 6 ring carbon atoms are substituted with —OH. In some embodiments, at least 7 ring carbon atoms are substituted with H. In some embodiments, at least 8 ring carbon atoms are substituted with —OFT. In some embodiments, at least 9 ring carbon atoms are substituted with —OH. In some embodiments, at least 10 ring carbon atoms are substituted with —OH. In some embodiments, at least 10%, 20%, 30%, 40%, 50%, 60%, 70%, 80%, 90%, or 95% percent of the ring carbon atoms of the cycloaliphatic or heterocyclic ring of R^{G} are substituted with —OH or —N(R′)₂. In some embodiments, at least 10% the ring carbon atoms are substituted with —OH or —N(R′)₂. In some embodiments, at least 20% the ring carbon atoms are substituted with —OH or N(R′)₂. In some embodiments, at least 30% of the ring carbon atoms are substituted with —OH or —N(R′)₂. In some embodiments, at least 40% of the ring carbon atoms are substituted with —OH or —N(R′)₂. In some embodiments, at least 50% of the ring carbon atoms are substituted with —OFT or —N(R′)₂. In some embodiments, at least 60% of the ring carbon atoms are substituted with —OH or —N(R′)₂. In some embodiments, at least 70% of the ring carbon atoms are substituted with —OFT or —N(R′)₂. In some embodiments, at least 80% of the ring carbon atoms are substituted with —OH or —N(R′)₂. In some embodiments, at least 90% of the ring carbon atoms are substituted with —OH or —N(R′)₂. In some embodiments, at least 95% of the ring carbon atoms are substituted with —OH or —N(R′)₂. In some embodiments, at least 10%, 20%, 30%, 40%, 50%, 60%, 70%, 80%, 90%, or 95% of the ring carbon atoms of the cycloaliphatic or heterocyclic ring of R^{G} are substituted with —OH. In some embodiments, at least 10% of the ring carbon atoms are substituted with —OH. In some embodiments, at least 20% of the ring carbon atoms are substituted with —OH. In some embodiments, at least 30% of the ring carbon atoms are substituted with —OFT. In some embodiments, at least 40% of the ring carbon atoms are substituted with —OH. In some embodiments, at least 50% of the ring carbon atoms are substituted with —OH. In some embodiments, at least 60% of the ring carbon atoms are substituted with —OH. In some embodiments, at least 70% of the ring carbon atoms are substituted with —OH. In some embodiments, at least 80% of the ring carbon atoms are substituted with —OH. In some embodiments, at least 90% of the ring carbon atoms are substituted with —OH. In some embodiments, at least 95% of the ring carbon atoms are substituted with —OH. In some embodiments, at least one ring carbon atom is substituted with N(R′)₂. In some embodiments, at least one ring carbon atom is substituted with NHC(O)R. In some embodiments, at least one ring carbon atom is substituted with NHC(O)R, wherein R is optionally substituted C₁₋₆ aliphatic. In some embodiments, at least one ring carbon atom is substituted with —NHAc.

[1163] In some embodiments, R^{G} is optionally substituted

[chemical structure]

In some embodiments, R¹ is —C(O)R. In some embodiments, R^{G} is

[chemical structure]

In some embodiments, R^{G} is optionally substituted

[chemical structure]

In some embodiments, R^{G} is optionally substituted

[chemical structure]

In some embodiments, R¹ is —C(O)R. In some embodiments, R^{G} is optionally substituted

[chemical structure]

[1164] In some embodiments, R^{CD}, or R^{G}, is of such a structure that R^{CD}—H, or R^{G}—H, is

[chemical structure]

[chemical structure]

In some embodiments, R^{CD}, or R^{G}, is of such a structure that R^{CD}—H, or R^{G}—H, is a ligand for the asialoglycoprotein receptor (ASGPR). Various other ASGPR ligands are known in the art and can be utilized in accordance with the present disclose. In some embodiments, carbohydrate moieties described in are useful for targeted delivery of provided oligonucleotides to liver.

[1165] In some embodiments, Lisa covalent bond. In some embodiments, L is bivalent optionally substituted C₁₋₆ aliphatic wherein one or more methylene units are independently and optionally replaced with —O— In some embodiments, L is —O—CH₂—.

[1166] In some embodiments, R^{CD} is an oligomeric or polymeric moiety of R^{G}—H, wherein each R^{G} is independently as described in the present disclosure.

[1167] In some embodiments, a PNPLA3 oligonucleotide or single-stranded RNAi agent comprises any targeting moiety described herein or known in the art. In some embodiments, a PNPLA3 oligonucleotide is a single-stranded RNAi agent.

[1168] In some embodiments, a targeting moiety is a ligand for the asialoglycoprotein receptor (ASGPR).

[1169] In some embodiments, a targeting moiety is a ligand for the asialoglycoprotein receptor (ASGPR) disclosed in: Sanhueza et al. J. Am. Chem. Soc., 2017, 139 (9), pp 3528-3536.

[1170] In some embodiments, a targeting moiety is a ligand for the asialoglycoprotein receptor (ASGPR) disclosed in Liras et al. US 20160207953.

[1171] In some embodiments, a targeting moiety is a substituted-6,8-dioxabicyclo[3.2.1]octane-2,3-diol derivative disclosed in Liras et al. US 20160207953.

[1172] In some embodiments, a targeting moiety is a ligand for the asialoglycoprotein receptor (ASGPR) disclosed in Liras et al. US 2015032955.5.

[1173] In some embodiments, a targeting moiety is a substituted-6,8-dioxabicyclo[3.2.1]octane-2,3-diol derivative disclosed in Liras et al. US 20150329555.

[1174] In some embodiments, an additional chemical moiety conjugated to a PNPLA3 oligonucleotide or single-stranded RNAi agent is a GalNAc moiety. In some embodiments, an additional chemical moiety conjugated to a PNPLA3 oligonucleotide or single-stranded RNAi agent is a GalNAc moiety which is conjugated at any position.

[1175] In some embodiments, an additional chemical moiety conjugated to a PNPLA3 oligonucleotide or single-stranded RNAi agent is a GalNAc moiety, conjugated via a linker to a 5′-H T In some embodiments, an additional chemical moiety conjugated to a PNPLA3 oligonucleotide or single-stranded RNAi agent is a GalNAc moiety, conjugated via a linker to a 5′-H T which is conjugated at any position.

[1176] In some embodiments, an additional chemical moiety is GaNC6T (also known as TGaNC6T, or conjugation of a GalNAc moiety to 5′H T via amino C6 linker) at any position.

[1177] In some embodiments, an additional chemical moiety is GaNC6T, e.g., conjugation of a GalNAc moiety to 5′H T via amino C6 linker (e.g., at the penultimate or antepenultimate nucleotide [counting 5′ to 3′]; for example, the 5′ nucleotide of the 3′-terminal dinucleotide (e.g., the 5′ nucleotide of the 3′-terminal dinucleotide is, of the two nucleotides of the 3′-terminal dinucleotide, the nucleotide clog to the 5′-end of the oligonucleotide) or the nucleotide immediately 5′ to the 5′ nucleotide of the 3′-terminal dinucleotide:

[chemical structure]

[1178] In some embodiments or single-stranded RNAi agent, the oligonucleotide or single-stranded RNAi agent comprises a linker conjugating a GalNAc moiety to the oligonucleotide or single-stranded RNAi agent. In some embodiments or single-stranded RNAi agent, the oligonucleotide or single-stranded RNAi agent comprises a linker conjugating a GalNAc moiety to the oligonucleotide or single-stranded RNAi agent, wherein the linker is attached at the 2′ position of a sugar. In some embodiments or single-stranded RNAi agent, the oligonucleotide or single-stranded RNAi agent comprises a linker conjugating a GalNAc moiety to the oligonucleotide or single-stranded RNAi agent, wherein the linker is attached to a base. In some embodiments or single-stranded RNAi agent, the oligonucleotide or single-stranded RNAi agent comprises a linker conjugating a GalNAc moiety to the oligonucleotide or single-stranded RNAi agent, wherein the linker is attached to a T base. In some embodiments or single-stranded RNAi agent, the oligonucleotide or single-stranded RNAi agent comprises a linker conjugating a GalNAc moiety to the oligonucleotide or single-stranded RNAi agent.

[1179] In some embodiments, a linker attaching a GalNAc moiety is a biocleavable linker. Such a linker allows the intracellular removal of the GalNAc moiety, so that the GalNAc moiety will not interfere with Ago-2 activity or RNA interference.

[1180] In some embodiments, a GalNAc moiety is conjugated to a PNPLA3 oligonucleotide or single-stranded RNAi agent at the penultimate or antepenultimate nucleotide.

[1181] In some embodiments, a GalNAc moiety can be conjugated at the penultimate nucleotide of a single-stranded RNAi agent (the more 5′ position of a 3′-terminal dinucleotide), or at the antepenultimate nucleotide of a single-stranded RNAi agent (the nucleotide immediate 5′ to the 3′-terminal dinucleotide). Without wishing to be bound by any particular theory, this disclosure suggests that the penultimate or antepenultimate nucleotide of a single-stranded RNAi agent (e.g., the more 5′ position of a 3′-terminal dinucleotide) can be adjacent to a pocket in Ago-2, and a GalNAc moiety may be capable of insertion into said pocket, such that the GaINAc moiety does not interfere with Ago-2 activity. Without wishing to be bound by any particular theory, this disclosure suggests that if a GalNAc moiety is attached at the penultimate or antepenultimate nucleotide, it may thus not be necessary to cleave the GalNAc moiety to allow RNAi activity, and it may thus be acceptable to use a more robust, non-biocleavable linker to attach a GalNAc moiety to the oligonucleotide or single-stranded RNAi agent. The more robust linker thus is less susceptible to cleavage, increasing the probability that a GalNAc moiety will increase delivery of the oligonucleotide or single-stranded RNAi agent.

[1182] In some embodiments, the GalNAc moiety is attached via a AMC6 linker.

[1183] In some embodiments, the GalNAc moiety is attached via a AMC6 linker attached at a T base (AMC6T).

[1184] In some embodiments, AMC6T has a structure of:

[chemical structure]

In some non-limiting examples, AMC6T is either the penultimate or antepenultimate nucleotide [counting 5′ to 3′]; for example, the 5′ nucleotide of the 3′-terminal dinucleotide, or the nucleotide immediately 5′ to the 5′ nucleotide of the 3′-terminal dinucleotide.

[1185] In some embodiments of a single-stranded RNAi agent, the single-stranded RNAi agent comprises a AMC6T at the penultimate or antepenultimate nucleotide.

[1186] As disclosed herein, GaNC6T is a component in an efficacious single-stranded RNAi agent. In some non-limiting examples, GaNC6T is either at the penultimate or antepenultimate nucleotide [counting 5′ to 3′]; for example, the 5′ nucleotide of the 3′-terminal dinucleotide, or the nucleotide immediately 5′ to the 5′ nucleotide of the 3′-terminal dinucleotide. In some non-limiting examples disclosed herein, GaNC6T is at nucleotide position 20 out of 21 (counting from the 5′-end), or 24 out of 25 (counting from the 5′-end).

[1187] In some embodiments, a PNPLA3 oligonucleotide or single-stranded RNAi agent is conjugated to Tri-antennary GalNAc Acid (e.g., via a C10, C3 or triazine linker):

[chemical structure]

These structures represent the protected versions, as they comprise -OAc (-O-acetate groups). In some embodiments, the Ac groups are removed during de-protection following conjugation of the compound to the oligonucleotide. In some embodiments, de-protection is performed with concentrated ammonium hydroxide, e.g., as described in Example 37B. In the de-protected versions of these structures, —OAc is replaced by —OH.

[1188] In some embodiments, a GalNAc moiety is conjugated at the 5′-end. Each of these additional chemical moieties (Tri-antennary GalNAc Acid, with each of the C12, C5 or triazine linkers) was conjugated to a PNPLA3 oligonucleotide targeting Factor XI (FXI), which operates via a RNase H mechanism.

[1189] Several oligonucleotides were constructed; each comprises a PNPLA3 oligonucleotide targeting Factor XI (FXI), which operates via a RNase H mechanism, with each conjugated to a different Tri-antennary GalNAc Acid, with each of the C12, C5 or triazine linkers. The Tri-antennary GalNAc Acid has been revealed experimentally (data not shown) to improve the delivery of the oligonucleotides to the liver.

[1190] In some embodiments, the present disclosure pertains to any oligonucleotide conjugated to Tri-antennary GalNAc Acid. In some embodiments, the present disclosure pertains to any oligonucleotide conjugated to Tri-antennary GalNAc Acid via a C10, C3 or triazine linker. In some embodiments, the present disclosure pertains to any oligonucleotide conjugated to Tri-antennary GalNAc Acid, wherein the oligonucleotide directs knockdown of a target transcript mediated by a RNase H or RNA interference mechanism. In some embodiments, the present disclosure pertains to any oligonucleotide conjugated to Tri-antennary GalNAc Acid via a C10, C3 or triazine linker, wherein the oligonucleotide directs knockdown of a target transcript mediated by a RNase H or RNA interference mechanism.

[1191] In some embodiments, the present disclosure pertains to any oligonucleotide conjugated to Tri-antennary GalNAc Acid, wherein the oligonucleotide directs knockdown of target transcript mediated by a RNase H or RNA interference mechanism, wherein the RNA interference mechanism is directed by a RNAi agent comprising 1, 2 or more strands. In some embodiments, the present disclosure pertains to any oligonucleotide conjugated to Tri-antennary GalNAc Acid via a C10, C3 or triazine linker, wherein the oligonucleotide directs knockdown of a target transcript mediated by a RNase H or RNA interference mechanism, wherein the RNA interference mechanism is directed by a RNAi agent comprising 1, 2 or more strands.

[1192] In addition, the present disclosure shows that in provided oligonucleotides capable of directing single-stranded RNA interference it is not necessary for the first nucleotide on the 5′-end of a single-stranded RNAi agent to match the corresponding portion of the sequence of the target transcript.

[1193] Oligonucleotides capable of directing single-stranded RNA interference were prepared and characterized using a variety of methods in accordance of the present disclosure. In some embodiments, a provided oligonucleotide composition is a single-stranded RNAi agent of a PNPLA3 oligonucleotide type listed in Table 1A. In some embodiments, a provided oligonucleotide composition is a single-stranded RNAi agent of a PNPLA3 oligonucleotide type listed as any of Formats illustrated in FIG. 1.

[1194] In some embodiments, a PNPLA3 oligonucleotide is capable of directing knockdown of a target transcript by both RNase H-mediated knockdown and RNA interference. Such a PNPLA3 oligonucleotide is described herein a dual mechanism or hybrid oligonucleotide.

[1195] In some embodiments, a PNPLA3 oligonucleotide, a PNPLA3 oligonucleotide that directs RNA interference, a PNPLA3 oligonucleotide that directs RNase H-mediated knockdown, or a PNPLA3 oligonucleotide that directs both RNA interference and RNase H-mediated knockdown can comprise any additional chemical moiety, including but not limited to, any GalNAc moiety described or referenced in any of: 5,382,524; 5,491,075; 5,545,553; 5,705,367; 5,733,765; 5,786,184; 5,798,233; 5,854,042; 5,871,990; 5,945,322; 6,165,469; 6,187,310; 6,342,382; 6,465,220; 6,503,744; 6,699,705; 6,723,545; 6,780,624; 6,825,019; 6,905,867; 6,911,337; 7,026,147; 7,078,207; 7,138,258; 7,166,717; 7,169,593; 7,169,914; 7,189,836; 7,192,756; 7,202,353; 7,208,304; 7,211,657; 7,217,549; 7,220,848; 7,238,509; 7,338,932; 7,371,838; 7,384,771; 7,462,474; 7,598,068; 7,608,442; 7,682,787; 7,723,092; 8,039,218; 8,137,941; 8,268,596; 8,871,723; or 9,222,080.

[1196] Dual Mechanism or Hybrid Oligonucleotide

[1197] In some embodiments, a PNPLA3 oligonucleotide or a PNPLA3 oligonucleotide that directs both RNA interference and RNase H-mediated knockdown can comprise structural element of any oligonucleotide described herein or known in the art.

[1198] As disclosed herein, some oligonucleotides are capable of directing knockdown of a transcript target by both RNase H-mediated knockdown and RNA interference.

[1199] As disclosed herein, some oligonucleotides (including but not limited to those described herein as dual mechanism or hybrid oligonucleotides or hybrid RNAi agents) are capable of directing knockdown of a transcript target by both RNase H-mediated knockdown and RNA interference.

[1200] Wishing to be bound by any particular theory, the present disclosure suggests that a hybrid oligonucleotide can have particular advantages to either a PNPLA3 oligonucleotide capable of directing knockdown solely by RNase H-mediated knockdown, or a PNPLA3 oligonucleotide capable of directing knockdown solely by RNA interference. For example, if several hybrid oligonucleotides are introduced into the same cell, some but not all hybrid oligonucleotide may participate in the RISC pathway; those which do not are available to participate in the RNase H-mediated pathway. For example, if several hybrid oligonucleotides are introduced into the same cell, some but not all hybrid oligonucleotide may participate in the RNase H-mediated pathway; those which do not are available to participate in the RISC pathway. Without wishing to be bound by any particular theory, the present disclosure suggests that a hybrid oligonucleotide may be able to mediate more efficacious knockdown than a PNPLA3 oligonucleotide capable of directing knockdown solely by RNaseH-mediated knockdown, or a PNPLA3 oligonucleotide capable of directing knockdown solely by RNA interference, as the hybrid oligonucleotide is capable of directing knockdown via both pathways. In at least some cells, levels of RNase H activity and RNA interference may differ from cell compartment to cell compartment. In some embodiments, a hybrid oligonucleotide can direct knockdown in various cell compartments via RNase H-mediated knockdown or RNA interference. In some embodiments, if RNase H is saturated with oligonucleotides, the excess oligonucleotides can be available for RNA interference-mediated knockdown. In some embodiments, if Ago-2 is saturated with oligonucleotides, the excess oligonucleotides can be available for RNase H-mediated knockdown.

[1201] In some embodiments, a hybrid oligonucleotide comprises a structure which allows both knockdown via RNase H-mediated knockdown and knockdown via RNA interference.

[1202] Reportedly, RNase H and RNAi both involve knockdown of a target mRNA, but they involve different mechanisms. Reportedly, RNase H naturally involves a single-stranded DNA molecule which binds to a mRNA target and decreases expression by either sterically hindering translation, or by the RNA/DNA duplex acting as a substrate for RNase H, which cleaves the mRNA target.

[1203] In contrast, reportedly, RNAi naturally involves a double-stranded RNA molecule, naturally produced by Dicer with two 3′ overhangs, including an antisense and a sense strand. The strands are separated as the duplex is unwound and the antisense incorporated into the RISC (RNA interference silencing complex), including Argonaute-2. The antisense strand acts as a guide for RISC to identity the complementary mRNA target and cleave it. As shown herein, certain formats of single-stranded RNAi agents are also efficacious, although single-stranded RNAi agents are not naturally produced by Dicer.

[1204] Reportedly, RNase H and RISC naturally prefer two structurally distinct types of molecules. RNase H naturally uses a single-stranded DNA molecule to target the mRNA target, forming a DNA/RNA duplex. Reportedly, RISC reportedly naturally uses a single-stranded RNA antisense strand to target the mRNA target, forming a RNA/RNA duplex. Crooke et al. 1995 Biochem. J. 312: 599-608; and Elbashir et al. Nature 2001 411: 494.

[1205] Crooke et al. 1995 Biochem. J. 312: 599-608 also reported that E. coli RNase H1 had been crystallized and studied, and that the preferred substrate was reportedly a RNA/DNA duplex. In the DNA strand, 2′-modifications such as 2′-OMe and 2′-F reportedly reduced or eliminated RNase H activity. In addition, for RNA interference, full replacement of RNA by DNA reportedly abolishes RNA interference activity of double-stranded RNAi agents. Elbashir et al. 2001 EMBO J. 20: 6877-6888. Thus, reportedly, RNase H-mediated knockdown reportedly requires a span of DNA (2′-deoxy), while RNA interference can be abolished by replacement of a span of nucleotides with DNA (2′-deoxy).

[1206] In contrast, as shown herein, 2′-OMe and 2′-F modifications are highly suitable for single-stranded RNAi agents. The Applicants thus designed and constructed several oligonucleotides which comprise (a) a seed region comprising 2′-modified nucleotides; and (b) a post-seed region comprising a stretch of 2′-deoxy (2′-deoxy) nucleotides. These are shown herein to function via both the RNAi and RNase H-mediated knockdown mechanisms.

[1207] In some embodiments, a hybrid oligonucleotide comprises a (a) seed region capable of annealing to a first complementary target mRNA region and mediating RNA interference; and (b) a post-seed region comprising a 2′-deoxy (2′-deoxy) region capable of annealing a second complementary target m RNA region and directing RNase H-mediated knockdown. The seed region can optionally comprise RNA or a modified nucleotide, e.g., with a 2′ modification (including but not limited to 2′-F, 2′-OMe and 2′-MOE), wherein the RNA or modified nucleotide comprise a natural sugar and/or a natural base, and/or a modified base, and/or an internucleotidic linkage.

[1208] A minimum length for a DNA (2′-deoxy) region efficacious for RNase H-mediated knockdown, in at least some cases, is reported to be about 5 consecutive DNA (2′-deoxy); this minimum deoxy length reportedly correlated with the minimum length required for efficient RNase H activation in vitro using partially purified mammalian RNase H enzyme. Monia et al. 1993 JBC 268: 14514-14522.

[1209] In some embodiments, a hybrid oligonucleotide comprises a (a) seed region capable of annealing to a first complementary target mRNA region; and (b) a post-seed region comprising a 2′-deoxy region, wherein the hybrid oligonucleotide is capable of directing both RNA interference and RNase H-mediated knockdown, wherein the 2′-deoxy region comprises at least 5 consecutive 2′-deoxy. In some embodiments, the 2′-deoxy can be DNA, or a modified nucleotide, e.g., a modified nucleotide with a 2′-deoxy, wherein the DNA or modified nucleotide comprise a natural sugar and/or a natural base, and/or a modified base, and/or any internucleotidic linkage. In some embodiments, the 2′-deoxy region comprises a stretch of consecutive nucleotides, wherein each nucleotide is 2′-deoxy and each internucleotidic linkage is a phosphorothioate. In some embodiments, the 2′-deoxy region comprises a stretch of consecutive nucleotides of at least 5, 6, 7, 8, 9, 10, 11, 12, 13, 14,15, 16, 17, 18, 19, 20 or 21 nucleotides, wherein each nucleotide is 2′-deoxy and each internucleotidic linkage is a phosphorothioate.

[1210] In some embodiments, a hybrid oligonucleotide comprises a (a) seed region capable of annealing to a first complementary target mRNA region; and (b) a post-seed region comprising a 2′-deoxy region, wherein the hybrid oligonucleotide is capable of directing both RNA interference and RNase H-mediated knockdown, wherein the 2′-deoxy region comprises at least 5 consecutive 2′-deoxy. In some embodiments, the 2′-deoxy can be DNA, or a modified nucleotide, e.g., a modified nucleotide with a 2′-deoxy, wherein the DNA or modified nucleotide comprise a natural sugar and/or a natural base, and/or a modified base, and/or any internucleotidic linkage. In some embodiments, the 2′-deoxy region comprises or is a span of consecutive nucleotides, wherein each nucleotide is 2′-deoxy and each internucleotidic linkage is a phosphorothioate, in some embodiments, the 2′-deoxy region comprises or is a stretch of consecutive nucleotides, wherein each nucleotide is 2′-deoxy and each internucleotidic linkage is a phosphorothioate. In some embodiments, the 2′-deoxy region comprises a stretch of consecutive nucleotides of at least 5, 6, 7, 8, 9, 10, 11, 12, 13, 14, 15, 16, 17, 18, 19, 20 or 21 nucleotides, wherein each nucleotide is 2′-deoxy and each internucleotidic linkage is a phosphorothioate.

[1211] Without wishing to be bound by any particular theory, the present disclosure notes that WO 2015/107 425 has reported that cleavage mediated by RNase H can be modulated by the arrangement of chiral centers in phosphorothioates in an antisense oligonucleotide directing RNase H cleavage. For example, the placement of a single Rp flanked by at least 2 or 3 Sp can alter the cleavage pattern, such that the number of cleavage sites is reduced and the site of RNase H-mediated cleavage is controlled.

[1212] In some embodiments, a hybrid oligonucleotide comprises a (a) seed region capable of annealing to a first complementary target mRNA region; and (b) a post-seed region comprising a 2′-deoxy region, wherein the hybrid oligonucleotide is capable of directing both RNA interference and RNase H-mediated knockdown, wherein the 2′-deoxy region comprises a stretch of consecutive nucleotides of at least 5, 6, 7, 8, 9, 10, 11, 12, 13, 14, 15, 16, 17, 18, 19, 20 or 21 nucleotides, wherein each nucleotide is 2′-deoxy and each internucleotidic linkage is a phosphorothioate.

[1213] In some embodiments, a hybrid oligonucleotide comprises a (a) seed region capable of annealing to a first complementary target mRNA region; and (b) a post-seed region comprising a 2′-deoxy region, wherein the hybrid oligonucleotide is capable of directing both RNA interference and RNase H-mediated knockdown, wherein the 2′-deoxy region comprises a stretch of consecutive nucleotides of at least 9 nucleotides, wherein each nucleotide is 2′-deoxy and each internucleotidic linkage is a phosphorothioate.

[1214] In some embodiments, the first and second complementary target mRNA regions are regions of the same target mRNA.

[1215] In some embodiments, the first and second complementary target mRNA regions are regions of different target mRNAs.

[1216] In some embodiments of a hybrid oligonucleotide, a seed region comprises a DNA region capable of annealing to a complementary target mRNA region and directing RNase H-mediated knockdown.

[1217] Without wishing to be bound by any particular theory, the present disclosure notes that, in many cases, RNase H cleaves a single-stranded RNA target which is bound to a single-stranded DNA. In some embodiments, a hybrid oligonucleotide comprises a single-stranded 2′-deoxy portion, which is capable of binding to a target RNA transcript, forming a substrate for RNase H, in some embodiments, a hybrid oligonucleotide comprises a single-stranded 2′-deoxy portion (which comprises internucleotidic linkages which can be any internucleotidic linkage described herein or known in the art), which is capable of binding to a target RNA transcript, forming a substrate for RNase H.

[1218] In some embodiments of a single-stranded RNAi agent, a post-seed region comprises: a sequence of nucleotides comprising at least 4 consecutive 2′-deoxy. In some embodiments of a single-stranded RNAi agent, a post-seed region comprises: a sequence of nucleotides comprising at least 5 consecutive 2′-deoxy. In some embodiments of a single-stranded RNAi agent, a post-seed region comprises: a sequence of nucleotides comprising at least 6 consecutive 2′-deoxy. In some embodiments of a single-stranded RNAi agent, a post-seed region comprises: a sequence of nucleotides comprising at least 7 consecutive 2′-deoxy. In some embodiments of a single-stranded RNAi agent, a post-seed region comprises: a sequence of nucleotides comprising at least 8 consecutive 2′-deoxy. In some embodiments of a single-stranded RNAi agent, a post-seed region comprises: a sequence of nucleotides comprising at least 9 consecutive 2′-deoxy. In some embodiments of a single-stranded RNAi agent, a post-seed region comprises: a sequence of nucleotides comprising at least 10 to 20 consecutive 2′-deoxy.

[1219] In some embodiments of a hybrid oligonucleotide, a post-seed region comprises: at least 9 consecutive 2′-deoxy. In some embodiments of a single-stranded RNAi agent, a post-seed region comprises: at least 10 consecutive 2′-deoxy. The ability of various single-stranded RNAi agents and antisense oligonucleotides to mediate RNA interference or RNase H knockdown is described herein and shown, as non-limiting examples, in the Figures and Tables.

[1220] Experimental data (not shown) and described in detail elsewhere herein demonstrated that putative dual mechanism oligonucleotides are capable of mediating both RNA interference and RNaseH knockdown. RNA interference was tested in either of two different in vitro Ago-2 assays, and RNase H knockdown was tested in an in vitro RNase H assay.

[1221] The experiments used an RNase H assay, with WV-1868 (ASO, mediating a RNase H knockdown mechanism) as a positive control, and WV-2110 (a single-stranded RNAi agent) as a negative control. RNA molecule WV-2372 is used as a test substrate. In the RNase H assay, dual mechanism oligonucleotide WV-2111 mediated RNase H knockdown.

[1222] Allele Specific Suppression

[1223] In some embodiments, provided oligonucleotides are capable of directing a decrease in the expression and/or level of a target gene or its gene product. In some embodiments, provided oligonucleotides are capable of mediating allele-specific suppression (or allele-specific knockdown).

[1224] In some embodiments, in some disease states, a patient (e.g., a human patient) can comprise two copies of the same gene, wherein one copy is wild-type (which is not disease-related), whereas the other copy on another chromosome has a mutation (which is disease-related). In some embodiments, the wild-type and mutant alleles can be differentiated by a particular sequence at the mutation, or else can be differentiated by a sequence outside the deleterious mutation (e.g., at a SNP). Knocking down both the mutant and wild-type alleles can sometimes be undesirable, because expression of the wild-type gene may be necessary or beneficial, while expression of the mutant gene may be deleterious or disease-related.

[1225] In some embodiments, a target sequence can be designed which recognizes the mutant transcript (e.g., one comprising the deleterious mutation or a targeted SNP) preferentially over the wild-type transcript.

[1226] In some embodiments, an allele-specific oligonucleotide maximizes knock-down of the mutant allele while minimizing knock-down of the wild-type allele, in a process referenced as allele-specific suppression or allele-specific knock-down. In some embodiments, a PNPLA3 oligonucleotide is capable of selectively targeting the mutant allele of a gene. In some embodiments, a PNPLA3 oligonucleotide is capable of knocking down the mutant allele compared to the wild-type allele with a specificity of at least 2-, 3-, 4-, 5-, 6-, 7-, 8-, 9-, 10-, 15-, 20-, 25-, 30-, 35-, 40-, 45- or 50-fold. In some embodiments, a PNPLA3 oligonucleotide is capable of selectively targeting the mutant allele of a gene, wherein the mutant allele is represented by one allele and the wild-type allele is represented by a different allele. In some embodiments, a mutation can be a double mutation (e.g., two mutations in close proximity that often occur together in the same genome). In some embodiments, a mutation is in PNPLA3. In some embodiments, a mutation is a double mutation in PNPLA3. In some embodiments, the I148M mutation is in PNPLA3. In some embodiments, an allele-specific oligonucleotide is an antisense oligonucleotide. In some embodiments, an allele-specific oligonucleotide is a PNPLA3 oligonucleotide or single-stranded RNAi agent. In some embodiments, an allele-specific oligonucleotide is a PNPLA3 oligonucleotide or single-stranded RNAi agent which has or comprises any format or structure described herein.

[1227] In some embodiments, an allele-specific RNAi agent maximizes knock-down of the mutant allele while minimizing knock-down of the wild-type allele, in a process referenced as allele-specific suppression. In some embodiments, a PNPLA3 oligonucleotide or single-stranded RNAi agent is capable of selectively targeting the mutant allele of a gene. In some embodiments, a PNPLA3 oligonucleotide or single-stranded RNAi agent is capable of knocking down the mutant allele compared to the wild-type allele with a specificity of at least 2-, 3-, 4-, 5-, 6-, 7-, 8-, 9-, 10-, 15-, 20-, 25-, 30-, 35-, 40-, 45- or 50-fold. In some embodiments, a PNPLA3 oligonucleotide or single-stranded RNAi agent is capable of selectively targeting the mutant allele of a gene, wherein the mutant allele is represented by one allele and the wild-type allele is represented by a different allele. In some embodiments, a mutation can be a double mutation (e.g., two mutations in close proximity that often occur together in the same genome). In some embodiments, a mutation is in PNPLA3. In some embodiments, a mutation is a double mutation in PNPLA3. In some embodiments, the 1148M mutation is in PNPLA3.

[1228] In some embodiments, a non-limiting example of a method of designing an allele-specific RNAi agent is to incorporate into the base sequence a SNP or single-nucleotide polymorphism, wherein the mutant allele is represented by one allele of a SNP and the wild-type allele is represented by a differ it allele of the SNP. In some embodiments, a SNP can be at a location which is not the site of the dis ease-related mutation, but nonetheless serves to differentiate the two alleles.

[1229] In some embodiments, a non-limiting example of a method of designing an allele-specific RNAi agent is to incorporate into the base sequence a mutation, wherein the mutant allele is represented by one allele and the wild-type allele is represented by a different allele. In some embodiments, a mutation can be a double mutation (e.g., two mutations in close proximity that often occur together in the same genome). In some embodiments, a mutation is in PNPLA3, in some embodiments, a mutation is a double mutation in PNPLA3. In some embodiments, the I148M mutation is in PNPLA3.

[1230] In some embodiments, a PNPLA3 oligonucleotide or single-stranded RNAi agent comprises a SNP or other sequence which differentiates between a mutant and a wild-type allele of a gene, and is capable of selectively knocking down the mutant allele relative to the wild type allele.

[1231] In some embodiments, the target sequence of a PNPLA3 oligonucleotide orsingle-stranded RNAi agent represents one allele of a target transcript.

[1232] As shown in the present disclosure, a provided single-stranded RNAi agent is capable of directing allele-specific RNA interference, wherein the ssRNAi is capable of knocking down a target mRNA having one sequence (e.g., a mutant sequence), but does not or does not significantly knock down a target mRNA having a related by different sequence (e.g. a wild-type version of the mutant sequence). In some embodiments, the mutant and wild-type sequences differ at one base position. In some embodiments, the mutant and wild-type sequences differ at two base positions. In some embodiments, the mutant and wild-type sequences differ at three base positions.

[1233] In some embodiments, a PNPLA3 oligonucleotide or single-stranded RNAi agent is capable of directing RNA interference against an allele of a target gene while not mediating RNA interference against a different allele of a target gene at the same concentration.

[1234] In some embodiments, a PNPLA3 oligonucleotide or single-stranded RNAi agent capable of directing allele-specific suppression comprises in its base sequence one or more SNPs at specific positions. These specific positions can be positions known or suspected to be sensitive to mismatches; e.g., a mismatch at one or more of these positions can alter the level of RNAi activity. See, for example, Miller et al. 2003 Proc. Natl. Acad. Sci. USA 100: 71.95-7200; Brummelkamp et al. 2002 Cancer Cell 2: 243; and Naito et al. 2004 Nucl. Acids Res. 32: W124-W129. In many cases, full complementarity of the seed region to a mRNA target is necessary or beneficial for high RNAi activity; in contrast, complementary is not required in many cases at the 5′ nucleotide moiety or at the 3′-terminal dinucleotide. In some embodiments, an allele-specific single-stranded RNAi agent has a SNP in the seed region.

[1235] In some embodiments, a PNPLA3 oligonucleotide or single-stranded RNAi agent is capable of mediating allele-specific suppression.

[1236] In some embodiments, a PNPLA3 oligonucleotide is capable of mediating allele-specific suppression.

[1237] In some embodiments, a single-stranded RNAi agent is capable of mediating allele-specific suppression.

[1238] In some embodiments, a PNPLA3 oligonucleotide or single-stranded RNAi agent is capable of mediating allele-specific suppression of PNPLA3.

[1239] In some embodiments, a PNPLA3 oligonucleotide is capable of mediating allele-specific suppression of PNPLA3.

[1240] In some embodiments, a single-stranded RNAi agent is capable of mediating allele-specific suppression of PNPLA3.

[1241] In some embodiments, In some embodiments, an allele-specific single-stranded RNAi agent has a SNP in the seed region, which lies between the seed and the 3′-terminal dinucleotide.

[1242] In some embodiments, a PNPLA3 oligonucleotide or single-stranded RNAi agent has a base sequence comprising one or more SNPs at any position.

[1243] In some embodiments, a PNPLA3 oligonucleotide or single-stranded RNAi agent has a base sequence comprising one or more SNPs at any position selected from 3, 4, 5, 6, 7, 8, 9, 10, 11, 12, 13, 14, 15, 16,17, 18, or 19.

[1244] In some embodiments, a PNPLA3 oligonucleotide or single-stranded RNAi agent has a base sequence comprising one or more SNPs at any position inside the seed region.

[1245] In some embodiments, a PNPLA3 oligonucleotide or single-stranded RNAi agent has a base sequence comprising one or more SNPs at any position outside the seed region.

[1246] In some embodiments, a PNPLA3 oligonucleotide or single-stranded RNAi agent has a base sequence comprising one or more SNPs at any position in the post-seed region.

[1247] In some embodiments, a PNPLA3 oligonucleotide or single-stranded RNAi agent has a base sequence comprising one or more SNPs at any of positions: 8, 9, 10,11, 12, 13, 14, 15, 16, 17, or 18.

[1248] In some embodiments, a PNPLA3 oligonucleotide or single-stranded RNAi agent has a base sequence comprising one or more SNPs at any of positions: 14 or 17.

[1249] In some embodiments, a PNPLA3 oligonucleotide or single-stranded RNAi agent has a base sequence comprising one or more SNPs at any of positions: 9 or 10.

[1250] In some embodiments, a PNPLA3 oligonucleotide or single-stranded RNAi agent has a base sequence comprising two or more SNPs.

[1251] In some embodiments, a PNPLA3 oligonucleotide or single-stranded RNAi agent has a base sequence comprising two SNPs.

[1252] In some embodiments, a PNPLA3 oligonucleotide or single-stranded RNAi agent has a base sequence comprising two SNPs, one each at positions 14 and 17.

[1253] In some embodiments, a PNPLA3 oligonucleotide or single-stranded RNAi agent is capable of directing allele-specific suppression against a mutant allele of a gene relative to a wild-type allele of the same gene.

[1254] In some embodiments, a PNPLA3 oligonucleotide or single-stranded RNAi agent is capable of directing allele-specific suppression against a mutant allele of PNPLA3 relative to a wild-type allele of PNPLA3.

[1255] Table 70A shows the in vitro potency and allelic specific suppression directed by different PNPLA3 single-stranded RNAi agents. Tested oligonucleotide is: WV-3387 in Huh7 and Hep3B cells.

[1256] Table 70B and Table 70C shows the in vitro potency and IC50 for different single-stranded RNAi agents, which target PNPLA3. Tested oligonucleotides are: WV-4054 and WV-4098. WV-4054 has a sequence complementary to a pair of SNPs, rs738408 T and rs738409 G, at positions 14 and 17, and is able to mediate allele-specific RNA interference against cells (Huh7) which comprise these two SNPs. This oligonucleotide does not mediate significant RNAi interference at the tested concentrations in different cells (Hep3B) which do not comprise these SNPs, but rather have rs738408C and rs738409 C. In addition, single-stranded RNAi agent WV-4098 is also able to knock-down a complementary sequence (with SNPs rs738408 T and rs738409 G in Huh7 cells), but not a non-complementary sequence (with SNPs rs738408C and rs738409 C in Hep3B cells) at the tested concentrations.

[1257] Table 71 shows the in vitro potency and allele-specific knock-down directed by single-stranded RNAi agents to PNPLA3. Tested oligonucleotides are: Table 71A, WV-2477, WV-3387, and WV-4054; Table 71B, non-allele specific control ASO WV-3387; and Table 71C, allele specific ssRNAi WV-4054.

[1258] Table 90A to 90F shows in vitro allele-specific suppression of different oligonucleotides, which target PNPLA3. The double mutation in 1148M in tested oligonucleotides is shown in Table 90A, as are cartoons of the oligonucleotide formats tested. Oligonucleotides with the 1148M double mutation were tested against: Hep3B cells (wild-type) and Huh7 cells (with double mutation). Oligonucleotides were delivered with lipofectamine and cells were tested at 48 hours. Oligonucleotides tested are: Table 90B, WV-7778 to WV-7793; and WV-3858 to WV-3864; Table 90C, WV-7794 to WV-7816; Table 90D, WV-7817 to WV-7839; Table 90E, WV-7840 to WV-7862; and Table 90F, WV-993, WV-3390, and WV-4054, wherein WV-4054 is a single-stranded RNAi agent. In these data, oligonucleotides used were antisense oligonucleotides which have a wing-core-wing format, wherein the core was 2′-deoxy phosphorothioate (random in stereochemistry), and the wings were fully 2′-OMe, fully 2′-MOE, or all 2′-OMe with 5′ and 3′-terminal LNA, or all 2′-MOE with 5′ and 3′-terminal LNA. The wings are also phosphodiester and 5′ and 3′-terminal stereorandom phosphorothioate.

[1259] The data demonstrate that many oligonucleotides were capable of directing allele-specific suppression (e.g., allele-specific knock-down). Oligonucleotides shown in Table 90B to 90E showed significant knock-down of the mutant allele in Huh7 cells and comparatively less knockdown of the wild-type allele in Hep3B cells. A single mismatch, even in the wings, was sufficient to mediate allele-specific suppression; however, in at least some cases, allele-specific suppression was increased when the two mismatches were both present in the DNA core.

[1260] Without wishing to be bound by any particular theory, the present disclosure notes that, in many cases, introduction of a stereocontrolled chiral internucleotidic linkage (in place of a stereorandom chiral internucleotidic linkage) can increase the allele-specific suppression, stability, efficacy, specificity, delivery, and/or albumin binding of a PNPLA3 oligonucleotide.

[1261] In some embodiments, a PNPLA3 oligonucleotide capable of mediating allele-specific suppression comprises one or more stereopure chiral internucleotidic linkages.

[1262] In some embodiments, a PNPLA3 oligonucleotide capable of mediating allele-specific suppression comprises one or more stereopure chiral internucleotidic linkages in the Sp configuration.

[1263] In some embodiments, a PNPLA3 oligonucleotide capable of mediating allele-specific suppression comprises one or more stereopure chiral internucleotidic linkages in the Sp configuration and one or more stereopure chiral internucleotidic linkages in the Rp configuration.

[1264] In some embodiments, a PNPLA3 oligonucleotide capable of mediating allele-specific suppression comprises one or more stereopure phosphorothioates.

[1265] In some embodiments, a PNPLA3 oligonucleotide capable of mediating allele-specific suppression comprises one or more stereopure phosphorothioates in the Sp configuration.

[1266] In some embodiments, a PNPLA3 oligonucleotide capable of mediating allele-specific suppression comprises one or more stereopure phosphorothioates in the Rp configuration.

[1267] In some embodiments, a PNPLA3 oligonucleotide capable of mediating allele-specific suppression comprises one or more stereopure phosphorothioates in the Sp configuration and one or more stereopure phosphorothioates in the Rp configuration.

[1268] In some embodiments, a PNPLA3 oligonucleotide capable of allele-specific suppression of a target gene or its gene product can comprise any structure or format described herein.

[1269] Multimers of Oligonucleotides

[1270] In some embodiments, a multimer comprises two or more of: a PNPLA3 oligonucleotide, a PNPLA3 oligonucleotide that directs RNA interference, a PNPLA3 oligonucleotide that directs RNase H-mediated knockdown and/or or a PNPLA3 oligonucleotide that directs both RNA interference and RNase H-mediated knockdown can have any format or structural element thereof described herein or known in the art.

[1271] In some embodiments, a provided composition comprises a combination of one or more provided oligonucleotide types. One of skill in the chemical and medicinal arts will recognize that the selection and amount of each of the one or more types of provided oligonucleotides in a provided composition will depend on the intended use of that composition. That is to say, one of skill in the relevant arts would design a provided chirally controlled oligonucleotide composition such that the amounts and types of provided oligonucleotides contained therein cause the composition as a whole to have certain desirable characteristics (e.g., biologically desirable, therapeutically desirable, etc.).

[1272] In some embodiments, a provided oligonucleotide type is selected from those described in WO/2014/0.12081 and WO/2015/107425, the oligonucleotides, oligonucleotide types, oligonucleotide compositions, and methods thereof of each of which are incorporated herein by reference. In some embodiments, a provided chirally controlled oligonucleotide composition comprises oligonucleotides of a PNPLA3 oligonucleotide type selected from those described in WO/2014/012081 and WO/2015/107425.

[1273] In some embodiments, the present disclosure pertains to a composition comprising a chirally controlled oligonucleotide composition, wherein the sequence of the oligonucleotide comprises or consists of the sequence of any chirally controlled oligonucleotide composition disclosed herein.

[1274] In some embodiments, the present disclosure pertains to a composition comprising a chirally controlled oligonucleotide composition, wherein the sequence of the oligonucleotide comprises or consists of the sequence of any single-stranded RNAi agent composition listed in Table 1 A or otherwise described herein.

[1275] In some embodiments, the present disclosure pertains to compositions comprising a multimer of oligonucleotides, e.g., single-stranded RNAi agents, antisense oligonucleotides and/or other oligonucleotides, at least one of which has a structure, sequence or other characteristic as described herein.

[1276] In some embodiments, the present disclosure pertains to compositions comprising a multimer of single-stranded RNAi agents, antisense oligonucleotides and/or other oligonucleotides, wherein the multimer is at least about 16 kD in size.

[1277] In some embodiments, the present disclosure pertains to compositions comprising a multimer of single-stranded RNAi agents, antisense oligonucleotides and/or other oligonucleotides, and further comprises a carbohydrate moiety, lipid moiety, targeting moiety, or other compound.

[1278] In some embodiments, the present disclosure pertains to compositions comprising a multimer of single-stranded RNAi agents, antisense oligonucleotides and/or other oligonucleotides, and further comprises a carbohydrate moiety, lipid moiety, targeting moiety, or other compound, the total weight of which is at least about 16 kD in size.

[1279] In some embodiments, the multimer can comprise at least 2 single-stranded RNAi agents, antisense oligonucleotides and/or other oligonucleotides. In some embodiments, the multimer can comprise at least 3 single-stranded RNAi agents, antisense oligonucleotides and/or other oligonucleotides. In some embodiments, the multimer can comprise at least 4 single-stranded RNAi agents, antisense oligonucleotides and/or other oligonucleotides. In some embodiments, the multimer can comprise at least 5 single-stranded RNAi agents, antisense oligonucleotides and/or other oligonucleotides. In some embodiments, the multimer can comprise at least 6 single-stranded RNAi agents, antisense oligonucleotides and/or other oligonucleotides. In some embodiments, the multimer can comprise at least 7 single-stranded RNAi agents, antisense oligonucleotides and/or other oligonucleotides, in some embodiments, the multimer can comprise at least 8 single-stranded RNAi agents, antisense oligonucleotides and/or other oligonucleotides. In some embodiments, the multimer can comprise at least 9 single-stranded RNAi agents, antisense oligonucleotides and/or other oligonucleotides. In some embodiments, the multimer can comprise at least 10 single-stranded RNAi agents, antisense oligonucleotides and/or other oligonucleotides.

[1280] Without wishing to be bound by any particular theory, the present disclosure suggests that multimerization of oligonucleotides can provide a multimer which has a total molecular weight sufficient for transport via the lymphatic system. Supersaxo et al. reported that there is a linear relationship between the molecular weight of a drug and the proportion of a dose absorbed lymphatically, and that molecules with a molecular weight greater than 16 kD are absorbed mainly by the lymphatics, which drain a subcutaneous injection site. Supersaxo et al. 1990 Pharm. Res. 7: 167-9. In some embodiments, a PNPLA3 oligonucleotide has a molecular weight of around 8 kD. In some embodiments, a multimer comprising multiple oligonucleotides has a molecular weight of at least around 16 kD.

[1281] Without wishing to be bound by any particular theory, the present disclosure notes that subcutaneous injections are reportedly widely utilized for delivery of drugs, including, but not limited to, those with limited oral availability, or as a means to modify or extend the release profile. McLennan et al 2005 Drug Disc. Today: Technologies 2: 89-96. Subcutaneous injection reportedly results in delivery to the interstitial area underlying the dermis of the skin, from where drugs enter the circulatory system, or the lymphatic system; transport is reportedly affected by molecular weight, particle size, charge, hydrophilicity, and interaction with components in the interstitium. Drug formulation characteristics, such as drug concentration, injection volume, ionic strength, viscosity, and pH can also all reportedly play roles in diffusion from the subcutaneous injection site. McLennan et al. 2005; Paniagua et al. 2012 Lymphology 45: 144-153; and Bagby et al. 2012 Pharmaceutics 4: 276-295.

[1282] In some embodiments, one or more characteristic of molecular weight, particle size, charge, hydrophilicity, and interaction with components in the interstitium, drug concentration, injection volume, ionic strength, viscosity, and/or pH are modulated to improve or maximize the efficacy, bioavailability or delivery of a composition comprising a PNPLA3 oligonucleotide.

[1283] As noted above, molecules with a molecular weight greater than 16 kD are reportedly absorbed mainly by the lymphatics. Supersaxo et al. 1990 Pharm. Res. 7: 167-9. In some embodiments, the present disclosure pertains to a composition comprising a multimer of oligonucleotides, wherein the multimer has a total molecular weight of at least about 16 kD. In some embodiments, the preset disclosure pertains to a composition comprising two or more different types or sizes of multimers of oligonucleotides, wherein the one or more of the different types of multimer has a total molecular weight of at least about 16 kD.

[1284] In some embodiments, each oligonucleotide in a multimer can target the same or different targets. In some embodiments, wherein the each oligonucleotide in a multimer can target the sane or different targets, administration of the multimer can be used to treat a disease involving over-expression or multiple target genes, in some embodiments, wherein the each oligonucleotide in a multimer can target the same or different targets, administration of the multimer can be used to treat different diseases involving over-expression of different target genes.

[1285] In some embodiments, each oligonucleotide in a multimer can target the same sequence in the same target. In some embodiments, each oligonucleotide in a multimer can target different sequences in the same target.

[1286] Non-limiting examples of multimers are shown in Table 89A.

[1287] In some embodiments, a multimer comprises two or more oligonucleotides directly connected to each other (e.g., via a bond or direct bond, such as a covalent bond), or via a linker.

[1288] Any linker described herein or known in the art can be used to link the oligonucleotides in a multimer. Various approaches for construction of multimers and use of various linkers is illustrated in Table 89B and 89C.

[1289] Without wishing to be bound by any particular theory, the present disclosure notes that; in at least some cases, a phosphorothioate in the Rp configuration is particularly susceptible to nuclease cleavage. In some embodiments of Multimer Type 2, a multimer is essentially a single long oligonucleotide, wherein the oligonucleotide comprises multiple shorter oligonucleotides, which are connected by short linker oligonucleotides. In some embodiments of Multimer Type 2, a multimer is essentially a single long oligonucleotide, wherein the oligonucleotide comprises multiple shorter oligonucleotides, which are connected by short linker oligonucleotides, wherein the short linker oligonucleotides comprise one or more internucleotidic linkages in the Rp configuration. In some embodiments of Multimer Type 2, a multimer is essentially a single long oligonucleotide, wherein the oligonucleotide comprises multiple shorter oligonucleotides, which are connected by short linker oligonucleotides, wherein the short linker oligonucleotides comprise one or more phosphorothioates in the Rp configuration.

[1290] Non-limiting examples of linkers include: a cleavable linker or a biodegradable linker; a non-cleavable or non-biodegradable linker; a linker comprising one or more internucleotidic linkages comprising a chiral center in the Rp configuration; a linker comprising one or more internucleotidic linkages comprising a chiral phosphorus in the Rp configuration; a linker comprising one or more phosphorothioate in the Rp configuration; a linker comprising two or more phosphorothioate in the Rp configuration; a linker comprising three or more phosphorothioate in the Rp configuration; a photocleavable linker; 1-(5-(N-maleimidomethyl)-2-nitrophenyl)ethanol N-hydroxysuccinimide ester; a linker comprising a maleimido moiety; a linker comprising a N-hydroxysuccinimide ester moiety; a linker conjugated to a PNPLA3 oligonucleotide at a base; a linker conjugated to a PNPLA3 oligonucleotide at an internucleotidic linkage; a linker conjugated at a sugar; a phosphodiester; a phosphotriester; a methylphosphonate; a P3′→N5′ phosphoramidate; a N3′→P5′ phosphoramidate; a N3′→P5′ thio-phosphoramidate; a phosphorothioate linkage; a thiourea linker; a C5 or C6 linker, as described in U.S. Pat. No. 9,572,891; a linker comprising a alkyl, cycloalkyl, aryl, heterocyclyl, and heteroaryl; a linker comprising a substituted alkyl, cycloalkyl, aryl, heterocyclyl, and heteroaryl; a linker of the structure of formula (A) of U.S. Pat. No. 9,512,163; a linker comprising a C1-C12 hydrocarbyl chain; a polyethylene glycol linker; a hexaethylene glycol linker, a hydrocarbyl chain; a substituted hydrocarbyl chain; a linker comprising one or more of: alkyl, substituted or unsubstituted alkenyl, substituted or unsubstituted alkynyl, arylalkyl, arylalkenyl, arylalkynyl, heteroarylalkyl, heteroarylalkenyl, heteroarylalkynyl, heterocyclylalkyl, heterocyclylalkenyl, heterocyclylalkynyl, aryl, heteroaryl, heterocyclyl, cycloalkyl, cycloalkenyl, alkylarylalkyl, alkylarylalkenyl, alkylarylalkynyl, alkenylarylalkyl, alkenylarylalkenyl, alkenylarylalkynyl, alkenylarylalkyl, alkynylarylalkenyl, alkynylarylalkynyl, alkylheteroarylalkyl, alkylheteroarylalkenyl, alkylheteroarylalkynyl, alkenylheteroarylalkyl, alkenylheteroarylalkenyl, alkenylheteroarylalkenyl, alkynylheteroarylalkyl, alkynylheteroarylalkenyl, alkynylheteroarylalkynyl, alkylheterocyclylalkyl, alkylheterocyclylalkenyl, alkylhererocyclylalkynyl, alkenylheterocyclylalkyl, alkenylheterocyclylalkenyl, alkenylheterocyclylalkynyl, alkynylheterocyclylalkyl, alkynylheterocyclylalkenyl, alkynylheterocyclylalkynyl, alkylaryl, alkenylaryl, alkynylaryl, alkylheteroaryl, alkenylheteroaryl, or alkenylheteroaryl; a linker comprising a peptide having an amino acid sequence selected from: ALAL, APISFFELG, FL, GFN, R/KXX, GRWHTVGLRWE, YL, GF, and FF, in which X is any amino acid; a linker comprising the formula —(CH₂)wS-S(CH₂)m-, wherein n and m are independently integers from 0 to 10; a linker comprising a low pH-labile bond; a linker comprising a low pH-labile bond comprising an amine, an imine, an ester, a benzoic imine, an amino ester, a diortho ester, a polyphosphoester, a polyphosphazene, an acetal, a vinyl ether, a hydrazone, an azidomethyl-methylmaleic anhydride, a thiopropionate, a masked endosomolytic agent or a citraconyl group; a branched linker; a cleavable linker susceptible to cleavage agents, e.g., pH, redox potential or the presence of degradative molecules; a redox cleavable linker; a phosphate-based cleavable linker; a phosphate-based cleavable linker comprising: —O—P(O)(OH)—O—, —O—P(S)(OH)—O—, —O—P(S)(SH)—O—, —S—P(O)(OH)—O—, —O—P(O)(OH)—S—, —S—P(O)(OH)—S—, —O—P(S)(OH)—S—, —S—P(S)(OH)—O—, —O—P(O)(H)—O—, —O—P(S)(H)—O—, —S—P(O)(H)—O—, —S—P(S)(H)—O—, —S—P(O)(H)—S—, or —O—P(S)(H)—S—; an acid cleavable linker; an ester-based linker; a peptide-based cleavable linker; and moieties comprising any of these linkers.

[1291] In some embodiments, a linker comprises a polypeptide that is more susceptible to cleavage by an endopeptidase in the mammalian extract than the targeting oligonucleotides. In some embodiments, the endopeptidase is trypsin, chymotrypsin, elastase, thermolysin, pepsin, or endopeptidase V8. In some embodiments, the endopeptidase is cathepsin B, cathepsin D, cathepsin L, cathepsin C, papain, cathepsin S or endosomal acidic insulinase.

[1292] Various linkers and methods of multimerization of oligonucleotides are described in, as non-limiting examples: U.S. Pat. Nos. 9,370,582; 9,371,348; 9,512,163; 9,572,891; and 6,031,091; and international published patent applications WO1998000435; WO2014043544; and WO2013040429.

[1293] The disclosure also notes that any linker described herein, or known in the art, can be used to link one or more oligonucleotides to each other, or to link one or more moiety (as non-limiting examples, a targeting moiety, a carbohydrate moiety, a GalNAc moiety, a lipid moiety, etc.) to one or more oligonucleotides (as non-limiting examples, a single-stranded RNAi agent, an antisense oligonucleotide, a double-stranded RNAi agent, a PNPLA3 oligonucleotide capable of directing or inhibiting exon skipping etc.).

### Example Methods for Preparing Oligonucleotides and Compositions

[1294] Methods for preparing provided oligonucleotides and oligonucleotide compositions are widely known in the art, including but not limited to those described in WO/2010,064146, WO/2011/005761, WO/2013/012758, WO/2014/010250, US2013/0178612, WO/2014/012081, WO/2015/107425, PCT/US2016/043542, and PCT/U 52016/043598, the methods and reagents of each of which is incorporated herein by reference.

[1295] Chirally controlled oligonucleotides.

[1296] In some embodiments, provided oligonucleotides are capable of directing a decrease in the expression and/or level of a target gene or its gene product. In some embodiments, provided oligonucleotides are chirally controlled.

[1297] In some embodiments, the present disclosure provides chirally controlled oligonucleotide compositions that, when compared to a reference condition [e.g., absence of the composition, presence of a reference composition (e.g., a stereorandom composition of oligonucleotides having the same base sequence, the same chemical modifications, etc., a PNPLA3 oligonucleotide or single-stranded RNAi agent of another stereoisomer, etc.), and combinations thereof], are capable of directing a decrease in the expression and/or level of a target gene or its gene product.

[1298] In some embodiments, the present disclosure provides chirally controlled oligonucleotide compositions that, when compared to a reference condition [e.g., absence of the composition, presence of a reference composition (e.g., a stereorandom composition of oligonucleotides having the same base sequence, the same chemical modifications, etc., a PNPLA3 oligonucleotide or single-stranded RNAi agent of another stereoisomer, etc.), and combinations thereof], mediate improved knockdown of transcripts via single-stranded RNA interference or RNase H.

[1299] Among other things, the present disclosure provides chirally controlled ssRNAi agents and chirally controlled compositions comprising one or more specific nucleotide types. In some embodiments, the phrase “oligonucleotide type,” as used herein, defines a PNPLA3 oligonucleotide that has a particular base sequence, pattern of backbone linkages, pattern of backbone chiral centers, and pattern of backbone phosphorus modifications (e.g., “—XLR¹” groups). Oligonucleotides of a common designated “type” are structurally identical to one another with respect to base sequence, pattern of backbone linkages, pattern of backbone chiral centers, and pattern of backbone phosphorus modifications. In some embodiments, oligonucleotides of a PNPLA3 oligonucleotide type are identical.

[1300] In some embodiments, a provided chirally controlled oligonucleotide or single-stranded RNAi agent in the disclosure has properties different from those of the corresponding stereorandom oligonucleotide or single-stranded RNAi agent mixture. In some embodiments, a chirally controlled oligonucleotide or single-stranded RNAi agent has lipophilicity different from that of the stereorandom oligonucleotide or single-stranded RNAi agent mixture. In some embodiments, a chirally controlled oligonucleotide or single-stranded RNAi agent has different retention time on HPLC. In some embodiments, a chirally controlled oligonucleotide or single-stranded RNAi agent may have a peak retention time significantly different from that of the corresponding stereorandom oligonucleotide or single-stranded RNAi agent mixture. During oligonucleotide or single-stranded RNAi agent purification using HPLC as generally practiced in the art, certain chirally controlled oligonucleotide or single-stranded RNAi agents will be largely if not totally lost. During oligonucleotide or single-stranded RNAi agent purification using HPLC as generally practiced in the art, certain chirally controlled oligonucleotide or single-stranded RNAi agents will be largely if not totally lost. One of the consequences is that certain diastereomers of a stereorandom oligonucleotide or single-stranded RNAi agent mixture (certain chirally controlled oligonucleotide or single-stranded RNAi agents) are not tested in assays. Another consequence is that from batches to batches, due to the inevitable instrumental and human errors, the supposedly “pure” stereorandom oligonucleotide or single-stranded RNAi agent will have inconsistent compositions in that diastereomers in the composition, and their relative and absolute amounts, are different from batches to batches. The chirally controlled oligonucleotide or single-stranded RNAi agent and chirally controlled oligonucleotide or single-stranded RNAi agent compositions provided in this disclosure overcome such problems, as a chirally controlled oligonucleotide or single-stranded RNAi agent is synthesized in a chirally controlled fashion as a single diastereomer (diastereoisomer), and a oligonucleotide or single-stranded RNAi agent comprises predetermined levels of one or more individual oligonucleotide or single-stranded RNAi agent types.

[1301] One of skill in the chemical and synthetic arts will appreciate that synthetic methods of the present disclosure provide for a degree of control during each step of the synthesis of a provided single-stranded RNAi agent such that each nucleotide unit of the single-stranded RNAi agent can be designed and/or selected in advance to have a particular stereochemistry at the linkage phosphorus and/or a particular modification at the linkage phosphorus, and/or a particular base, and/or a particular sugar, in some embodiments, a provided single-stranded RNAi agent is designed and/or selected in advance to have a particular combination of stereocenters at the linkage phosphorus of the internucleotidic linkage.

[1302] In some embodiments, a provided single-stranded RNAi agent made using methods of the present disclosure is designed and/or determined to have a particular combination of linkage phosphorus modifications. In some embodiments, a provided single-stranded RNAi agent made using methods of the present disclosure is designed and/or determined to have a particular combination of bases. In some embodiments, a provided single-stranded RNAi agent made using methods of the present disclosure is designed and/or determined to have a particular combination of sugars. In some embodiments, a provided single-stranded RNAi agent made using methods of the present disclosure is designed and/or determined to have a particular combination of one or more of the above structural characteristics.

[1303] Methods of the present disclosure exhibit a high degree of chiral control. For instance, methods of the present disclosure facilitate control of the stereochemical configuration of every single linkage phosphorus within a provided single-stranded RNAi agent. In some embodiments, methods of the present disclosure provide an single-stranded RNAi agent comprising one or more modified internucleotidic linkages independently having the structure of Formula I.

[1304] In some embodiments, methods of the present disclosure provide an single-stranded RNAi agent which is a unimer. In some embodiments, methods of the present disclosure provide an single-stranded RNAi agent which is a unimer of configuration Rp. In some embodiments, methods of the present disclosure provide an single-stranded RNAi agent which is a unimer of configuration Sp.

[1305] In some embodiments, methods of the present disclosure provide a chirally controlled single-stranded RNAi agent composition, i.e., an single-stranded RNAi agent composition that contains predetermined levels of individual single-stranded RNAi agent types. In some embodiments a PNPLA3 oligonucleotide or a single-stranded RNAi agent comprises one single-stranded RNAi agent type. In some embodiments, a single-stranded RNAi agent comprises more than one single-stranded RNAi agent type. In some embodiments, a PNPLA3 oligonucleotide or single-stranded RNAi agent composition comprises a plurality of oligonucleotide and/or single-stranded RNAi agent types. Example chirally controlled oligonucleotide and single-stranded RNAi agent compositions made in accordance with the present disclosure are described herein.

[1306] In some embodiments, a PNPLA3 oligonucleotide comprises a chiral internucleotidic linkage (e.g., is stereocontrolled). In some embodiments, a PNPLA3 oligonucleotide comprises a chiral internucleotidic linkage which is stereocontrolled and a chiral internucleotidic linkage which is not stereocontrolled, in some embodiments, a PNPLA3 oligonucleotide comprises a chiral internucleotidic linkage which is stereocontrolled and an internucleotidic linkage which is not chiral. Various non-limiting examples of formats of stereocontrolled (chirally controlled) oligonucleotides are shown in Tables 71A to 71C. In some embodiments, a PNPLA3 oligonucleotide has a structure of Format S1. In some embodiments, a PNPLA3 oligonucleotide has a structure of Format S2. In some embodiments, a PNPLA3 oligonucleotide has a structure of Format S3, in some embodiments, a PNPLA3 oligonucleotide has a structure of Format S4, in some embodiments, a PNPLA3 oligonucleotide has a structure of Format S5. In some embodiments, a PNPLA3 oligonucleotide has a structure of Format S6. In some embodiments, a PNPLA3 oligonucleotide has a structure of Format S7. In some embodiments, a PNPLA3 oligonucleotide has a structure of Format S8. In some embodiments, a PNPLA3 oligonucleotide has a structure of Format S9. In some embodiments, a PNPLA3 oligonucleotide has a structure of Format S10, in some embodiments, a PNPLA3 oligonucleotide has a structure of Format S11. In some embodiments, a PNPLA3 oligonucleotide has a structure of Format S12, in some embodiments, a PNPLA3 oligonucleotide has a structure of Format S13. In some embodiments, a PNPLA3 oligonucleotide has a structure of Format S14, in some embodiments, a PNPLA3 oligonucleotide has a structure of Format S15, in some embodiments, a PNPLA3 oligonucleotide has a structure of Format S16. In some embodiments, a PNPLA3 oligonucleotide has a structure of Format S17. In some embodiments, a PNPLA3 oligonucleotide has a structure of Format S18, in some embodiments, a PNPLA3 oligonucleotide has a structure of Format S19. In some embodiments, a PNPLA3 oligonucleotide has a structure of Format S20. In some embodiments, a PNPLA3 oligonucleotide has a structure of Format S21. In some embodiments, a PNPLA3 oligonucleotide has a structure of Format S22. In some embodiments, a PNPLA3 oligonucleotide has a structure of Format S23. In some embodiments, a PNPLA3 oligonucleotide has a structure of Format S24. In some embodiments, a PNPLA3 oligonucleotide has a structure of Format S25. In some embodiments, a PNPLA3 oligonucleotide has a structure of Format S26. In some embodiments, a PNPLA3 oligonucleotide has a structure of Format S27. In some embodiments, a PNPLA3 oligonucleotide has a structure of Format S28. In some embodiments, a PNPLA3 oligonucleotide has a structure of Format S29, in some embodiments, a PNPLA3 oligonucleotide has a structure of Format S30. In some embodiments, a PNPLA3 oligonucleotide has a structure of Format S31. In some embodiments, a PNPLA3 oligonucleotide has a structure of Format S32. In some embodiments, a PNPLA3 oligonucleotide has a structure of Format S33. In some embodiments, a PNPLA3 oligonucleotide has a structure of Format S34. In some embodiments, a PNPLA3 oligonucleotide has a structure of Format S35. In some embodiments, a PNPLA3 oligonucleotide has a structure of Format S36. In some embodiments, a PNPLA3 oligonucleotide has a structure of Format S37. In some embodiments, a PNPLA3 oligonucleotide has a structure of Format S38. In some embodiments, a PNPLA3 oligonucleotide has a structure of Format S39, in some embodiments, a PNPLA3 oligonucleotide has a structure of Format S40. In some embodiments, a PNPLA3 oligonucleotide has a structure of Format S41, in some embodiments, a PNPLA3 oligonucleotide has a structure of Format S42. In some embodiments, a PNPLA3 oligonucleotide has a structure of Format S43. In some embodiments, a PNPLA3 oligonucleotide has a structure of Format S44.

[1307] In some embodiments, methods of the present disclosure provide chirally pure compositions with respect to the configuration of the linkage phosphorus. That is to say, in some embodiments, methods of the present disclosure provide compositions of wherein the oligonucleotide exists in the composition in the form of a single diastereomer with respect to the configuration of the linkage phosphorus.

[1308] In some embodiments, methods of the present disclosure provide chirally uniform compositions with respect to the configuration of the linkage phosphorus. That is to say, in some embodiments, methods of the present disclosure provide compositions of in which all nucleotide units therein have the same stereochemistry with respect to the configuration of the linkage phosphorus, e.g., all nucleotide units are of the Rp configuration at the linkage phosphorus or all nucleotide units are of the Sp configuration at the linkage phosphorus.

[1309] In some embodiments, a PNPLA3 oligonucleotide or a single-stranded RNAi agent comprises at least one Sp (e.g., a phosphorothioate or other internucleotidic linkage having a chiral center, in the Sp configuration). In some embodiments, a PNPLA3 oligonucleotide or a single-stranded RNAi agent comprises at least 5 Sp. In some embodiments, a PNPLA3 oligonucleotide or a single-stranded RNAi agent comprises at least 10 Sp. In some embodiments, a PNPLA3 oligonucleotide or a single-stranded RNAi agent comprises at least 15 to 25 Sp.

[1310] As shown herein, the incorporation of one or more Sp internucleotidic linkage or one or more Sp PS (phosphorothioate) performs two functions for a single-stranded RNAi agent: (a) it increases stability against nucleases; and (b) does not interfere with RNA interference activity. While single-stranded RNAi agents and double-stranded RNAi agents differ in many aspects, this disclosure notes that, reportedly, many chemical modifications have been attempted for double-stranded RNAi agents, wherein the modifications did not both (a) stabilize the molecule against nucleases; and (b) allow RNA interference activity. Many chemical modifications reportedly perform one function but not the other. Some chemical modifications of double-stranded RNAi agents reportedly stabilized the molecule against nucleases, but interfered with or abolished RNAi activity. Other chemical modifications of double-stranded RNAi agents reportedly did not interfere with RNAi activity, but also did not stabilize the molecules against nucleases. See, for example, Czaudema et al. 2003 Nucl. Acids Res. 31: 2705-2716; Hadwiger et al. 2005, pages 194-206, in RNA interference Technology, ed. K. Appasani, Cambridge University Press, Cambridge, UK; Deleavey et al. 2009 Curr. Prot. Nucl. Acid Chem. 16.3.1-16.3.22; Terrazas et al. 2009 Nucl. Acids Res. 37: 346-353; Schwarz et al. 2002 Mol. Cell 10: 537-548; and Lipardi et al. 2001 Cell 107: 299-307. Only a minority of chemical modifications of double-stranded RNAi agents were capable of performing both functions. Furthermore, Matranga et al. 2005 Cell 123: 607-620 showed that introduction of a single Sp internucleotidic linkage (e.g. a single Sp PS) into the sense strand of a double-stranded RNAi agent greatly decreased RISC assembly and RNA interference activity. Thus, the chemical modification of a double-stranded RNAi agent with a single Sp internucleotidic linkage (e.g., a single Sp PS) did not (b) allow RNA interference activity. Thus, this disclosure endeavored to test the effect(s) of incorporation of Sp internucleotidic linkages or Sp PS into a single-stranded RNAi agent. The data shown herein show that, surprisingly, the incorporation of a Sp internucleotidic linkage or Sp PS performs two functions for a single-stranded RNAi agent: (a) it increases stability against nucleases; and (b) does not interfere with RNA interference activity.

[1311] As shown in the data shown in Table 45, the stability of a single-stranded RNAi agent against nucleases was increased by converting a stereorandom phosphorothioate at the 5′-end and/or 3′-end to a phosphorothioate in the Sp configuration. Additional increases in stability were obtained by converting stereorandom phosphorothioates at nuclease cleavage sites identified herein to phosphorothioates in the Sp configuration.

[1312] Without wishing to be bound by any particular theory, the disclosure suggests that incorporation of phosphorothioates or other chiral internucleotidic linkages in a Sp configuration may protect single-stranded RNAi agents from nucleases. Experiments revealed nuclease cleavage sites identified in a stereorandom single-stranded RNAi agent, WV-2817, which targets a different gene, APOC3. These major cleavage sites are between two pyrimidines (5′-U′U-3′, 5′-U′U-3′ or 5′-T′U-3′, where indicates the cleavage site). Additional major nuclease cleavage sites were identified for stereorandom single-stranded RNAi agent WV-3242: 5′-U′U-3′, 5′-C′U-3′, and 5′-T′U-3′. Of the six major nuclease cleavage sites, five were between two adjacent pyrimidines and one was adjacent to a pyrimidine. Experimental data shown in Table 45 indicates that replacing one or more of the nuclease cleavage sites with a Sp internucleotidic linkage (or chiral internucleotidic linkage in a Sp configuration, e.g., a Sp PS or a phosphorothioate in the Sp configuration) greatly increased the stability of the single stranded RNAi agents.

[1313] Single-stranded RNAi agents comprising multiple Sp internucleotidic linkages (e.g., Sp PS) were also tested to determine if the Sp abolished RNAi activity. The present disclosure notes that previous work has shown that many stereorandom oligonucleotides can decrease or completely lose their enzymatic or biological activity if converted into stereocontrolled versions. For many previously described oligonucleotides, introduction of Sp internucleotidic linkages can decrease or abolish activity.

[1314] Table 44 shows that, surprisingly, in addition to increasing stability, replacing multiple internucleotidic linkages (whether stereorandom or phosphodiester) with Sp internucleotidic linkages (e.g., Sp PS) did not decrease or eliminate RNA interference activity of a single-stranded RNAi agent. These results are also surprising because, reportedly, the introduction of a Sp PS into a stereorandom oligonucleotide in many cases is known to reduce biological activity. Thus, the introduction of one or more Sp internucleotidic linkages or Sp PS both increased stability of a single-stranded RNAi agent, and did not decrease or abolish RNAi activity.

[1315] Table 69A to C also shows that, surprisingly, in addition to increasing stability, replacing multiple internucleotidic linkages (whether stereorandom or phosphodiester) with Sp internucleotidic linkages (e.g., Sp PS) increased stability in and simultaneously did not decrease or eliminate RNA interference activity of a single-stranded RNAi agent. In some cases, activity was increased. These results are also surprising because, reportedly, the introduction of a Sp PS into a stereorandom oligonucleotide in many cases is known to reduce biological activity. Thus, the introduction of one or more Sp internucleotidic linkages or Sp PS both increased stability of a single-stranded RNAi agent, and did not decrease or abolish RNAi activity.

[1316] In some embodiments or a single-stranded RNAi agent, the oligonucleotide or single-stranded RNAi comprises 1 or more Sp internucleotidic linkages. In some embodiments or a single-stranded RNAi agent, the oligonucleotide or single-stranded RNAi comprises 1 or more Sp internucleotidic linkages at the 5′ and/or 3′-end of the oligonucleotide or single-stranded RNAi agent. In some embodiments or a single-stranded RNAi agent, the oligonucleotide or single-stranded RNAi comprises 1 or more Sp internucleotidic linkages at sites susceptible to nuclease cleavage.

[1317] In some embodiments or a single-stranded RNAi agent, the oligonucleotide or single-stranded RNAi comprises 1 or more Sp PS. In some embodiments or a single-stranded RNAi agent, the oligonucleotide or single-stranded RNAi comprises 1 or more Sp PS at the 5′ and/or 3′-end of the oligonucleotide or single-stranded RNAi agent, in some embodiments or a single-stranded RNAi agent, the oligonucleotide or single-stranded RNAi comprises 1 or more Sp PS at sites susceptible to nuclease cleavage.

[1318] Among other things, the present disclosure recognizes the challenge of stereoselective (rather than stereorandom or racemic) preparation of single-stranded RNAi agents. Among other thing, the present disclosure provides methods and reagents for stereoselective preparation of single-stranded RNAi agents comprising multiple (e.g., more than 5, 6, 7, 8, 9, or 10) internucleotidic linkages, and particularly for single-stranded RNAi agents comprising multiple (e.g., more than 5, 6, 7, 8, 9, or 10) chiral internucleotidic linkages. In some embodiments, in a stereorandom or racemic preparation of single-stranded RNAi agents, at least one chiral internucleotidic linkage is formed with less than 90:10, 95:5, 96:4, 97:3, or 98:2 diastereoselectivity. In some embodiments, for a stereoselective or chirally controlled preparation of single-stranded RNAi agents, each chiral internucleotidic linkage is formed with greater than 90:10, 95:5, 96:4, 97:3, or 98:2 diastereoselectivity. In some embodiments, for a stereoselective or chirally controlled preparation of single-stranded RNAi agents, each chiral internucleotidic linkage is formed with greater than 95:5 diastereoselectivity. In some embodiments, fora stereoselective or chirally controlled preparation of single-stranded RNAi agents, each chiral internucleotidic linkage is formed with greater than 96:4 diastereoselectivity. In some embodiments, for a stereoselective or chirally controlled preparation of single-stranded RNAi agents, each chiral internucleotidic linkage is formed with greater than 97:3 diastereoselectivity. In some embodiments, for a stereos elective or chirally controlled preparation of single-stranded RNAi agents, each chiral internucleotidic linkage is formed with greater than 98:2 diastereoselectivity. In some embodiments, for a stereoselective or chirally controlled preparation of single-stranded RNAi agents, each chiral internucleotidic linkage is formed with greater than 99:1 diastereoselectivity. In some embodiments, diastereoselectivity of a chiral internucleotidic linkage in an single-stranded RNAi agent may be measured through a model reaction, e.g. formation of a dimer under essentially the same or comparable conditions wherein the dimer has the same internucleotidic linkage as the chiral internucleotidic linkage, the 5′-nucleoside of the dimer is the same as the nucleoside to the 5′-end of the chiral internucleotidic linkage, and the 3′-nucleoside of the dimer is the same as the nucleoside to the 3′-end of the chiral internucleotidic linkage.

[1319] In some embodiments, a PNPLA3 oligonucleotide or a single-stranded RNAi agent is a composition designed to comprise multiple oligonucleotide or single-stranded RNAi agent types. In some embodiments, methods of the present disclosure allow for the generation of a library of chirally controlled single-stranded RNAi agents such that a pre-selected amount of any one or more chirally controlled single-stranded RNAi agent types can be mixed with any one or more other chirally controlled single-stranded RNAi agent types to create a chirally controlled single-stranded RNAi agent composition. In some embodiments, the pre-selected amount of an single-stranded RNAi agent type is a composition having any one of the above-described diastereomeric purities.

[1320] In some embodiments, the present disclosure provides methods for making a chirally controlled single-stranded RNAi agent comprising steps of:
[1321] (1) coupling;
[1322] (2) capping;
[1323] (3) modifying;
[1324] (4) deblocking; and
[1325] (5) repeating steps (1)-(4) until a desired length is achieved.

[1326] When describing the provided methods, the word “cycle” has its ordinary meaning as understood by a person of ordinary skill in the art. In some embodiments, one round of steps (1)-(4) is referred to as a cycle.

[1327] In some embodiments, the present disclosure provides methods for making chirally controlled single-stranded RNAi agent compositions, comprising steps of:
[1328] (a) providing an amount of a first chirally controlled single-stranded RNAi agent; and
[1329] (b) optionally providing an amount of one or more additional chirally controlled single-stranded RNAi agents.

[1330] In some embodiments, a first chirally controlled single-stranded RNAI agent is an single-stranded RNAi agent type, as described herein. In some embodiments, a one or more additional chirally controlled single-stranded RNAi agent is a one or more single-stranded RNAi agent type, as described herein.

[1331] One of skill in the relevant chemical and synthetic arts will recognize the degree of versatility and control over structural variation and stereochemical configuration of a provided single-stranded RNAi agent when synthesized using methods of the present disclosure. For instance, after a first cycle is complete, a subsequent cycle can be performed using a nucleotide unit individually selected for that subsequent cycle which, in some embodiments, comprises a nucleobase and/or a sugar that is different from the first cycle nucleobase and/or sugar. Likewise, the chiral auxiliary used in the coupling step of the subsequent cycle can be different from the chiral auxiliary used in the first cycle, such that the second cycle generates a phosphorus linkage of a different stereochemical configuration. In some embodiments, the stereochemistry of the linkage phosphorus in the newly formed internucleotidic linkage is controlled by using stereochemically pure phosphoramidites. Additionally, the modification reagent used in the modifying step of a subsequent cycle can be different from the modification reagent used in the first or former cycle. The cumulative effect of this iterative assembly approach is such that each component of a provided single-stranded RNAi agent can be structurally and configurationally tailored to a high degree. An additional advantage to this approach is that the step of capping minimizes the formation of “n−1” impurities that would otherwise make isolation of a provided single-stranded RNAi agent extremely challenging, and especially single-stranded RNAi agents of longer lengths.

[1332] In some embodiments, an example cycle of the method for making chirally controlled single-stranded RNAi agents is illustrated in example schemes described in the present disclosure. In some embodiments, an example cycle of the method for making chirally controlled single-stranded RNAi agents is illustrated in Scheme 1. In some embodiments, [symbol] represents the solid support, and optionally a portion of the growing chirally controlled single-stranded RNAi agent attached to the solid support. The chiral auxiliary exemplified has the structure of formula 3-1:

[chemical structure]

which is further described below. “Cap” is any chemical moiety introduced to the nitrogen atom by the capping step, and in some embodiments, is an amino protecting group. One of ordinary skill in the art understands that in the first cycle, there may be only one nucleoside attached to the solid support when started, and cycle exit can be performed optionally before deblocking. As understood by a person of skill in the art, B^{PRO} is a protected base used in single-stranded RNAi agent synthesis. Each step of the above-depicted cycle of Scheme 1 is described further below.

[chemical structure]

### Synthesis on Solid Support

[1333] In some embodiments, the synthesis of a provided single-stranded RNAi agent is performed on solid phase. In some embodiments, reactive groups present on a solid support are protected. In some embodiments, reactive groups present on a solid support are unprotected. During single-stranded RNAi agent synthesis a solid support is treated with various reagents in several synthesis cycles to achieve the stepwise elongation of a growing single-stranded RNAi agent chain with individual nucleotide units. The nucleoside unit at the end of the chain which is directly linked to the solid support is termed “the fast nucleoside” as used herein. A first nucleoside is bound to a solid support via a linker moiety, i.e. a diradical with covalent bonds between either of a CPG, a polymer or other solid support and a nucleoside. The linker stays intact during the synthesis cycles performed to assemble the oligonucleotide chain and is cleaved after the chain assembly to liberate the oligonucleotide from the support.

[1334] Solid supports for solid-phase nucleic acid synthesis include the supports described in, e.g., U.S. Pat. Nos. 4,659,774, 5,141,813, 4,458,066; Caruthers U.S. Pat. Nos. 4,415,732, 4,458,066, 4,500,707, 4,668,777, 4,973,679, and 5,132,418; Andrus et al. U.S. Pat. Nos. 5,047,524, 5,262,530; and Koster U.S. Pat. No. 4,725,677 (reissued as RE34,069). In some embodiments, a solid phase is an organic polymer support. In some embodiments, a solid phase is an inorganic polymer support. In some embodiments, an organic polymer support is polystyrene, aminomethyl polystyrene, a polyethylene glycol-polystyrene graft copolymer, polyacrylamide, polymethacrylate, polyvinylalcohol, highly cross-linked polymer (HCP), or other synthetic polymers, carbohydrates such as cellulose and starch or other polymeric carbohydrates, or other organic polymers and any copolymers, composite materials or combination of the above inorganic or organic materials. In some embodiments, an inorganic polymer support is silica, alumina, controlled polyglass (CPG), which is a silica-gel support, or aminopropyl CPG. Other useful solid supports include fluorous solid supports (see e.g., WO/2005/070859), long chain alkylamine (LCAA) controlled pore glass (CPG) solid supports (see e.g., S. P. Adams, K. S. Kavka, E. J. Wykes, S. B. Holder and G. R. Galluppi, J. Am. Chem. Soc., 1983, 105, 661-663; G. R. Gough, M. J. Bruden and P. T. Gilliam, Tetrahedron Lett., 1981, 22, 4177-4180). Membrane supports and polymeric membranes (see e.g. Innovation and Perspectives in Solid Phase Synthesis, Peptides, Proteins and Nucleic Acids, ch 21 pp 157-162, 1994, Ed. Roger Epton and U.S. Pat. No. 4,923,901) are also useful for the synthesis of nucleic acids. Once formed, a membrane can be chemically functionalized for use in nucleic acid synthesis. In addition to the attachment of a functional group to the membrane, the use of a linker or spacer group attached to the membrane is also used in some embodiments to minimize steric hindrance between the membrane and the synthesized chain.

[1335] Other suitable solid supports include those generally known in the art to be suitable for use in solid phase methodologies, including, for example, glass sold as Primer™ 200 support, controlled pore glass (CPG), oxalyl-controlled pore glass (see, e.g., Alul, et al., Nucleic Acids Research, 1991, 19, 1527), TentaGel Support-an aminopolyethyleneglycol derivatized support (see, e.g., Wright, et al., Tetrahedron Lett., 1993, 34, 3373), and Poros-a copolymer of polystyrene/divinylbenzene.

[1336] Surface activated polymers have been demonstrated for use in synthesis of natural and modified nucleic acids and proteins on several solid supports mediums. A solid support material can be any polymer suitably uniform in porosity, having sufficient amine content, and sufficient flexibility to undergo any attendant manipulations without losing integrity. Examples of suitable selected materials include nylon, polypropylene, polyester, poly tetrafluoroethylene, polystyrene, polycarbonate, and nitrocellulose. Other materials can serve as a solid support, depending on the design of the investigator. In consideration of some designs, for example, a coated metal, in particular gold or platinum can be selected (see e.g., US publication No. 20010055761), in one embodiment of single-stranded RNAi agent synthesis, for example, a nucleoside is anchored to a solid support which is functionalized with hydroxyl or amino residues. Alternatively, a solid support is derivatized to provide an acid labile trialkoxytrityl group, such as a trimethoxytrityl group (TMT). Without being bound by theory, it is expected that the presence of a trialkoxytrityl protecting group will permit initial detritylation under conditions commonly used on DNA synthesizers. For a faster release of single-stranded RNAi agent material in solution with aqueous ammonia, a diglycolate linker is optionally introduced onto the support.

[1337] In some embodiments, a provided single-stranded RNAi agent alternatively is synthesized from the 5′ to 3′ direction. In some embodiments, a nucleic acid is attached to a solid support through its 5′ end of the growing nucleic acid, thereby presenting its 3′ group for reaction, i.e. using 5′-nucleoside phosphoramidites or in enzymatic reaction (e.g. ligation and polymerization using nucleoside 5′-triphosphates). When considering the 5′ to 3′ synthesis the iterative steps of the present disclosure remain unchanged (i.e. capping and modification on the chiral phosphorus).

### Linking Moiety

[1338] A linking moiety or linker is optionally used to connect a solid support to a compound comprising a free nucleophilic moiety. Suitable linkers are known such as short molecules which serve to connect a solid support to functional groups (e.g., hydroxyl groups) of initial nucleosides molecules in solid phase synthetic techniques. In some embodiments, the linking moiety is a succinamic acid linker, or a succinate linker (—CO—CH₂—CH₂—CO—), or an oxalyl linker (—CO—CO—). In some embodiments, the linking moiety and the nucleoside are bonded together through an ester bond. In some embodiments, a linking moiety and a nucleoside are bonded together through an amide bond. In some embodiments, a linking moiety connects a nucleoside to another nucleotide or nucleic acid. Suitable linkers are disclosed in, for example, Oligonucleotides And Analogues A Practical Approach, Ekstein, F. Ed., IRL Press, N.Y., 1991, Chapter 1 and Solid-Phase Supports for Oligonucleotide Synthesis, Pon, R. T., Curr. Prot. Nucleic Acid Chem., 2000, 3.1.1-3.1.28.

[1339] A linker moiety is used to connect a compound comprising a free nucleophilic moiety to another nucleoside, nucleotide, or nucleic acid. In some embodiments, a linking moiety is a phosphodiester linkage. In some embodiments, a linking moiety is an H-phosphonate moiety. In some embodiments, a linking moiety is a modified phosphorus linkage as described herein. In some embodiments, a universal linker (UnyLinker) is used to attached the oligonucleotide to the solid support (Ravikumar et al., Org Process Res. Dev., 2008, 12 (3), 399-410). In some embodiments, other universal linkers are used (Pon, R. T., Curr. Prot. Nucleic Acid Chem., 2000, 3.1.1-3.1.28). In some embodiments, various orthogonal linkers (such as disulfide linkers) are used (Pon, R. T., Curr. Prof. Nucleic Acid Chem., 2000, 3.1.1-3.1.28).

[1340] Among other things, the present disclosure recognizes that a linker can be chosen or designed to be compatible with a set of reaction conditions employed in single-stranded RNAi agent synthesis. In some embodiments, to avoid degradation of single-stranded RNAi agents and to avoid desulfurization, auxiliary groups are selectively removed before de-protection. In some embodiments, DPSE group can selectively be removed by F⁻ ions. In some embodiments, the present disclosure provides linkers that are stable under a DPSE de-protection condition, e.g., 0.1M TBAF in MeCN, 0.5M ITF-Et₃N in THF or MeCN, etc. In some embodiments, a provided linker is the SP linker. In some embodiments, the present disclosure demonstrates that the SP linker is stable under a DPSE de-protection condition, e.g., 0.1M TBAF in MeCN, 0.5M HF-Et₃N in THF or MeCN, etc.; they are also stable, e.g., under anhydrous basic conditions, such as omlMDBU in MeCN.

[chemical structure]

[1341] In some embodiments, an example linker is:

[chemical structure]

In some embodiments, the succinyl linker, Q-linker or oxalyl linker is not stable to one or more DPSE-deprotection conditions using F⁻.

### General Conditions—Solvents for Synthesis

[1342] Syntheses of provided oligonucleotides are generally performed in aprotic organic solvents. In some embodiments, a solvent is a nitrile solvent such as, e.g., acetonitrile. In some embodiments, a solvent is a basic amine solvent such as, e.g., pyridine. In some embodiments, a solvent is an ethereal solvent such as, e.g., tetrahydrofuran. In some embodiments, a solvent is a halogenated hydrocarbon such as, e.g., dichloromethane. In some embodiments, a mixture of solvents is used. In certain embodiments a solvent is a mixture of any one or more of the above-described classes of solvents.

[1343] In some embodiments, when an aprotic organic solvent is not basic, a base is present in the reacting step. In some embodiments where a base is present, the base is an amine base such as, e.g., pyridine, quinoline, or N,N-dimethylaniline. Example other amine bases include pyrrolidine, piperidine, N-methyl pyrrolidine, pyridine, quinoline, N,N-dimethylaminopyridine (DMAP), or N,N-dimethylaniline.

[1344] In some embodiments, a base is other than an amine base.

[1345] In some embodiments, an aprotic organic solvent is anhydrous. In some embodiments, an anhydrous aprotic organic solvent is freshly distilled, in some embodiments, a freshly distilled anhydrous aprotic organic solvent is a basic amine solvent such as, e.g., pyridine. In some embodiments, a freshly distilled anhydrous aprotic organic solvent is an ethereal solvent such as, e.g., tetrahydrofuran. In some embodiments, a freshly distilled anhydrous aprotic organic solvent is a nitrile solvent such as, e.g., acetonitrile.

### Chiral Reagent/Chiral Auxiliary

[1346] In some embodiments, chiral reagents are used to confer stereoselectivity in the production of chirally controlled oligonucleotides. Many different chiral reagents, also referred to by those of skill in the art and herein as chiral auxiliaries, may be used in accordance with methods of the present disclosure. Examples of such chiral reagents are described herein and in Wada I, II and III, referenced above. In some embodiments of the disclosure, a chiral reagent is a compound of one of the following formulae:

[chemical structure]

[1347] As demonstrated herein, when used for preparing a chiral internucleotidic linkage, to obtain stereoselectivity generally stereochemically pure chiral reagents are utilized.

[1348] Additional chiral auxiliaries and their use can be found in e.g., Wada 1 (JP4348077; WO2005/014609; WO2005/092909), Wada II (WO2010/064146), Wada III (WO2012/039448), Chiral Control (WO2010/064146), etc.

### Activation

[1349] An achiral H-phosphonate moiety is treated with the first activating reagent to form the first intermediate. In one embodiment, the first activating reagent is added to the reaction mixture during the condensation step. Use of the first activating reagent is dependent on reaction conditions such as solvents that are used for the reaction. Examples of the first activating reagent are phosgene, trichloromethyl chloroformate, bis(trichloromethyl)carbonate (BTC), oxalyl chloride, Ph₃PCl₂, (PhO)₁PCl₂ N,N′-bis(2-oxo-3-oxazolidinyl)phosphinic chloride (BopCl), 1,3-dimethyl-2-(3-nitro-1,2,4-triazol-1-yl)-2-pyrrolidin-1-yl-1,3,2-diazaphospholidinium hexafluorophosphate (MNTP), or 3-nitro-1,2,4-triazol-1 yl-tris(pyrrolidin-1 yl)phosphonium hexafluorophosphate (PyNTP).

[1350] The example of achiral H-phosphonate moiety is a compound shown in the above Scheme. DBU represents 1,8-diazabicyclo[5.4.0]undec-7-ene. H⁺DBU may be, for example, ammonium ion, alkylammonium ion, heteroaromatic iminium ion, or heterocyclic iminium ion, any of which is primary, secondary, tertiary or quaternary, or a monovalent metal ion.

Reacting with Chiral Reagent

[1351] After the first activation step, the activated achiral H-phosphonate moiety reacts with a chiral reagent.

### Stereospecific Condensation Step

[1352] A chiral intermediate is treated with the second activating reagent and a nucleoside to form a condensed intermediate. The nucleoside may be on solid support. Examples of the second activating reagent are 4,5-dicyanoimidazole (DCI), 4,5-dichloroimidazole, 1-phenyl imidazolium triflate (PhIMT), benzimidazolium inflate (BIT), benztriazole, 3-nitro-1,2,4-triazole (NT), tetrazole, 5-ethylthiotetrazole (FIT), 5-benzylthiotetrazole own, 5-(4-nitrophenyl)tetrazole, N-cyanomethylpyrrolidinium triflate (CMPT), N-cyanomethylpiperidinium triflate, N-cyanomethyldimethylammonium triflate. A chiral intermediate of Formula Z-Va ((Z-Vb), (Z-Va′), or (Z-Vb′)) may be isolated as a monomer. Usually, the chiral intermediate of Z-Va ((Z-Vb), (Z-Va′), or (Z-Vb′)) is not isolated and undergoes a reaction in the same pot with a nucleoside or modified nucleoside to provide a chiral phosphite compound, a condensed intermediate. In other embodiments, when the method is performed via solid phase synthesis, the solid support comprising the compound is filtered away from side products, impurities, and/or reagents.

### Capping Step

[1353] If the final nucleic acid is larger than a dimer, the unreacted -OFT moiety is capped with a blocking group and the chiral auxiliary in the compound may also be capped with a blocking group to form a capped condensed intermediate. If the final nucleic acid is a dimer, then the capping step is not necessary.

### Modifying Step

[1354] The compound is modified by reaction with an electrophile. The capped condensed intermediate may be executed modifying step. In some embodiments, the modifying step is performed using a sulfur electrophile, a selenium electrophile or a boronating agent. Examples of modifying steps are step of oxidation and sulfurization.

[1355] In some embodiments of the method, the sulfur electrophile is a compound having one of the following formulas:

S₈ (Formula Z-B), Z^{z1}—S—S—Z^{z2}, or Z^{z1}—S-_{Vz}-Z^{z2};

wherein Z^{z1} and Z^{z2} are independently alkyl, aminoalkyl, cycloalkyl, heterocyclic, cycloalkylalkyl, heterocycloalkyl, aryl, heteroaryl, alkyloxy, aryloxy, heteroaryloxy, acyl, amide, imide, or thiocarbonyl, or Z^{z1} and Z^{z2} are taken together to form a 3 to 8 membered alicyclic or heterocyclic ring, which may be substituted or unsubstituted; _{Vz} is SO₂, O, or NR^{f}; and R^{f} is hydrogen, alkyl, alkenyl, alkynyl, or aryl.

[1356] Additional sulfur electrophiles are known in the art.

[1357] In some embodiments, after the modifying step, a chiral auxiliary group falls off from the growing oligonucleotide chain. In some embodiments, after the modifying step, a chiral auxiliary group remains connected to the internucleotidic phosphorus atom.

[1358] In some embodiments of the method, the modifying step is an oxidation step. In some embodiments of the method, the modifying step is an oxidation step using similar conditions as described above in this application. In some embodiments, an oxidation step is as disclosed in, e.g., JP 20.10-265304 A and WO2010/064146.

### Chain Elongation Cycle and De-Protection Step

[1359] The capped condensed intermediate is deblocked to remove the blocking group at the 5-end of the growing nucleic acid chain to provide a compound. The compound is optionally allowed to re-enter the chain elongation cycle to form a condensed intermediate, a capped condensed intermediate, a modified capped condensed intermediate, and a 5′-deprotected modified capped intermediate. Following at least one round of chain elongation cycle, the 5′-deprotected modified capped intermediate is further deblocked by removal of the chiral auxiliary ligand and other protecting groups for, e.g., nucleobase, modified nucleobase, sugar and modified sugar protecting groups, to provide a nucleic acid. In other embodiments, the nucleoside comprising a 5′-OH moiety is an intermediate from a previous chain elongation cycle as described herein. In yet other embodiments, the nucleoside comprising a 5′-OH moiety is an intermediate obtained from another known nucleic acid synthetic method. In embodiments where a solid support is used, the phosphorus-atom modified nucleic acid is then cleaved from the solid support. In certain embodiments, the nucleic acids is left attached on the solid support for purification purposes and then cleaved from the solid support following purification.

[1360] In yet other embodiments, the nucleoside comprising a 5′-OH moiety is an intermediate obtained from another known nucleic acid synthetic method. In yet other embodiments, the nucleoside comprising a 5′-OH moiety is an intermediate obtained from another known nucleic acid synthetic method as described in this application. In yet other embodiments, the nucleoside comprising a 5′-OH moiety is an intermediate obtained from another known nucleic acid synthetic method comprising one or more cycles illustrated in Scheme I. In some embodiments, the present disclosure provides oligonucleotide synthesis methods that use stable and commercially available materials as starting materials. In some embodiments, the present disclosure provides oligonucleotide synthesis methods to produce stereocontrolled phosphorus atom-modified oligonucleotide derivatives using an achiral starting material.

[1361] In some embodiments, the method of the present disclosure does not cause degradations under the de-protection steps. Further the method does not require special capping agents to produce phosphorus atom-modified oligonucleotide derivatives.

### Condensing Reagent

[1362] Condensing reagents (C_{R}) useful in accordance with methods of the present disclosure are of any one of the following general formulae:

[chemical structure]

wherein Z¹, Z², Z³, Z⁴, Z⁵, Z⁶, Z⁷, Z⁸, and Z⁹ are independently optionally substituted group selected flour alkyl, aminoalkyl, cycloalkyl, heterocyclic, cycloalkylalkyl, heterocycloalkyl, aryl, heteroaryl, alkyloxy, aryloxy, or heteroaryloxy, or wherein any of Z² and Z³, Z⁵ and Z⁶, Z⁷ and Z⁸, Z⁸ and Z⁹, Z⁹ and Z⁷, or Z⁷ and Z⁸ and Z⁹ are taken together to form a 3 to 20 membered alicyclic or heterocyclic ring; Q⁻ is a counter anion; and LG is a leaving group.

[1363] In some embodiments, a counterion of condensing reagent C_{R} is Cl⁻, Br, BF₄⁻; PF₆⁻, TfO⁻, Tf₂N⁻, AsF₆⁻, ClO₄⁻, or SbF₆⁻, wherein Tf is CF₃SO₂. In some embodiments, a leaving group of a condensing reagent C_{g} is F, Cl, Br, I, 3-nitro-1,2,4-triazole, imidazole, alkyltriazole, tetrazole, pentafluorobenzene, or 1-hydroxybenzotriazole.

[1364] In some embodiments, a condensing reagent is selected from those described in WO/2006/066260.

[1365] In some embodiments, a condensing reagent is 1,3-dimethyl-2-(3-nitro-1,2,4-triazol-1-yl)-2-pyrrolidin-1-yl-1,3,2-diazaphospholidinium hexafluorophosphate (MNTP), or 3-nitro-1,2,4-triazol-1 yl-tris(pyrrolidin-1-yl)phosphonium hexafluorophosphate (PyNTP):

[chemical structure]

### Selection of Base and Sugar of Nucleoside Coupling Partner

[1366] As described herein, nucleoside coupling partners for use in accordance with methods of the present disclosure can be the same as one another or can be different from one another. In some embodiments, nucleoside coupling partners for use in the synthesis of a provided oligonucleotide are of the same structure and/or stereochemical configuration as one another. In some embodiments, each nucleoside coupling partner for use in the synthesis of a provided oligonucleotide is not of the same structure and/or stereochemical configuration as certain other nucleoside coupling partners of the oligonucleotide. Example nucleobases and sugars for use in accordance with methods of the present disclosure are described herein. One of skill in the relevant chemical and synthetic arts will recognize that any combination of nucleobases and sugars described herein are contemplated for use in accordance with methods of the present disclosure.

### Coupling Step

[1367] Example coupling procedures and chiral reagents and condensing reagents for use in accordance with the present disclosure are outlined in, inter alia, Wada I (JP4348077; WO2005/014609; WO2005/092909), Wada II (WO2010/064146), Wada III (WO2012/039448), and Chiral Control (WO2010/064146). Chiral nucleoside coupling partners for use in accordance with the present disclosure are also referred to herein as “Wada amidites.” In some embodiments, a coupling partner has the structure of

[chemical structure]

wherein B^{PRO} is a protected nucleobase. In some embodiments, a coupling partner has the structure of.

[chemical structure]

wherein B^{PRO} is a protected nucleobase. In some embodiments, a coupling partner has the structure of

[chemical structure]

wherein B^{PRO} is a protected nucleobase, and R¹ is as defined and described herein. In some embodiments, a coupling partner has the structure of

[chemical structure]

wherein B^{PRO} is a protected nucleobase, and R¹ is as defined and described herein. In some embodiments. R¹ is optionally substituted C1-6 alkyl. In some embodiments, R¹ is Me.
Additional examples are described in WO/2010/064146, WO/2011/005761, WO/2013/012758, WO/2014/010250, US2013/0178612, WO/2014/012081, WO/2015/107425, WO/2017/015555, and WO/2017/062862, the phosphoramidites of each of which is incorporated herein by reference.

[1368] In some embodiments, the step of coupling comprises reacting a free hydroxyl group of a nucleotide unit of a PNPLA3 oligonucleotide with a nucleoside coupling partner under suitable conditions to effect the coupling. In some embodiments, the step of coupling is preceded by a step of deblocking. For instance, in some embodiments, the 5′ hydroxyl group of the growing oligonucleotide is blocked (i.e., protected) and must be deblocked in order to subsequently react with a nucleoside coupling partner.

[1369] Once the appropriate hydroxyl group of the growing oligonucleotide has been deblocked, the support is washed and dried in preparation for delivery of a solution comprising a chiral reagent and a solution comprising an activator. In some embodiments, a chiral reagent and an activator are delivered simultaneously. In some embodiments, co-delivery comprises delivering an amount of a chiral reagent in solution (e.g., a phosphoramidite solution) and an amount of activator in a solution (e.g., a CMPT solution) in a polar aprotic solvent such as a nitrile solvent (e.g., acetonitrile).

[1370] In some embodiments, the step of coupling provides a crude product composition in which the chiral phosphite product is present in a diastereomeric excess of >95%. In some embodiments, the chiral phosphite product is present in a diastereomeric excess of >96%. In some embodiments, the chiral phosphite product is present in a diastereomeric excess of >97%. In some embodiments, the chiral phosphite product is present in a diastereomeric excess of >98%, in some embodiments, the chiral phosphite product is present in a diastereomeric excess of >99%.

### Capping Step:

[1371] Provided methods for making chirally controlled oligonucleotides comprise a step of capping. In some embodiments, a step of capping is a single step. In some embodiments, a step of capping is two steps. In some embodiments, a step of capping is more than two steps. In some embodiments, a step of capping comprises steps of capping the free amine of the chiral auxiliary and capping any residual unreacted 5′ hydroxyl groups. In some embodiments, the free amine of the chiral auxiliary and the unreacted 5 hydroxyl groups are capped with the same capping group. In some embodiments, the free amine of the chiral auxiliary and the unreacted 5′ hydroxyl groups are capped with different capping groups. In certain embodiments, capping with different capping groups allows for selective removal of one capping group over the other during synthesis of the oligonucleotide. In some embodiments, the capping of both groups occurs simultaneously. In some embodiments, the capping of both groups occurs iteratively. In certain embodiments, capping occurs iteratively and comprises a first step of capping the free amine followed by a second step of capping the free 5′ hydroxyl group, wherein both the free amine and the 5′ hydroxyl group are capped with the same capping group. For instance, in some embodiments, the free amine of the chiral auxiliary is capped using an anhydride (e.g., phenoxyacetic anhydride, i.e., Pac₂O) prior to capping of the 5′ hydroxyl group with the same anhydride. In certain embodiments, the capping of the 5′ hydroxyl group with the same anhydride occurs under different conditions (e.g., in the presence of one or more additional reagents). In some embodiments, capping of the 5′ hydroxyl group occurs in the presence of an amine base in an ethereal solvent (e.g., NMI (N-methylimidazole) in THF). The phrase “capping group” is used interchangeably herein with the phrases “protecting group” and “blocking group”. In some embodiments, an amine capping group is characterized in that it effectively caps the amine such that it prevents rearrangement and/or decomposition of the intermediate phosphite species. In some embodiments, a capping group is selected for its ability to protect the amine of the chiral auxiliary in order to prevent intramolecular cleavage of the internucleotide linkage phosphorus. In some embodiments, a 5′ hydroxyl group capping group is characterized in that it effectively caps the hydroxyl group such that it prevents the occurrence of “shortmers,” e.g., “n-m” (m and n are integers and m<n; n is the number of bases in the targeted oligonucleotide) impurities that occur from the reaction of a PNPLA3 oligonucleotide chain that fails to react in a first cycle but then reacts in one or more subsequent cycles. The presence of such shortmers, especially “n−1”, has a deleterious effect upon the purity of the crude oligonucleotide and makes final purification of the oligonucleotide tedious and generally low-yielding. In some embodiments, a particular cap is selected based on its tendency to facilitate a particular type of reaction under particular conditions. For instance, in some embodiments, a capping group is selected for its ability to facilitate an E1 elimination reaction, which reaction cleaves the cap and/or auxiliary from the growing oligonucleotide. In some embodiments, a capping group is selected for its ability to facilitate an E2 elimination reaction, which reaction cleaves the cap and/or auxiliary from the growing oligonucleotide. In some embodiments, a capping group is selected for its ability to facilitate a β-elimination reaction, which reaction cleaves the cap and/or auxiliary from the growing oligonucleotide.

### Modifying Step:

[1372] As used herein, the phrase “modifying step”, “modification step” and “P-modification step” are used interchangeably and refer generally to any one or more steps used to install a modified internucleotidic linkage. In some embodiments, the modified internucleotidic linkage having the structure of Formula I. A P-modification step of the present disclosure occurs during assembly of a provided oligonucleotideratherthanafterassemblyofaprovidedoligonucleotideiscomplete. Thus, each nucleotide unit of a provided oligonucleotide can be individually modified at the linkage phosphorus during the cycle within which the nucleotide unit is installed. In some embodiments, a suitable P-modification reagent is a sulfur electrophile, selenium electrophile, oxygen electrophile, boronating reagent, or an aside reagent.

[1373] For instance, in some embodiments, a selenium reagent is elemental selenium, a selenium salt, or a substituted diselenide. In some embodiments, an oxygen electrophile is elemental oxygen, peroxide, or a substituted peroxide. In some embodiments, a boronating reagent is a borane-amine (e.g., N,N-diisopropylethylamine (BH₃·DIPEA), borane-pyridine (BH₃·Py), borane-2-chloropyridine (BH₃·CPy), borane-aniline (BH₃·An)), a borane-ether reagent (e.g., borane-tetrahydrofuran (BH₃·THF)), a borane-dialkylsulfide reagent (e.g., BH₃·Me₂S), aniline-cyanoborane, or a triphenylphosphine-carboalkoxy borane. In some embodiments, an azide reagent is comprises an azide group capable of undergoing subsequent reduction to provide an amine group.

[1374] In some embodiments, a P-modification reagent is a sulfurization reagent as described herein. In some embodiments, a step of modifying comprises sulfurization of phosphorus to provide a phosphorothioate linkage or phosphorothioatetriester linkage. In some embodiments, a step of modifying provides a PNPLA3 oligonucleotide having an internucleotidic linkage of Formula I.

[1375] In some embodiments, the present disclosure provides sulfurizing reagents, and methods of making, and use of the same.

[1376] In some embodiments, such sulfurizing reagents are thiosulfonate reagents.

[1377] Various sulfurizing reagents and thiosulfonate reagents are known in the art.

[1378] In some embodiments, a sulfurization reagent for use in accordance with the present disclosure is characterized in that the moiety transferred to phosphorus during sulfurization is a substituted sulfur (e.g., —SR) as opposed to a single sulfur atom (e.g., —S⁻ or ═—S).

[1379] In some embodiments, a sulfurization reagent for use in accordance with the present disclosure is characterized in that the activity of the reagent is tunable by modifying the reagent with a certain electron withdrawing or donating group.

[1380] In some embodiments, a sulfurization reagent for use in accordance with the present disclosure is characterized in that it is crystalline. In some embodiments, a sulfurization reagent for use in accordance with the present disclosure is characterized in that it has a high degree of crystallinity. In certain embodiments, a sulfurization reagent for use in accordance with the present disclosure is characterized by ease of purification of the reagent via, e.g., recrystallization. In certain embodiments, a sulfurization reagent for use in accordance with the present disclosure is characterized in that it is substantially free from sulfur-containing impurities. In some embodiments, sulfurization reagents which are substantially free from sulfur-containing impurities show increased efficiency.

[1381] In some embodiments, the provided chirally controlled oligonucleotide comprises one or more phosphate diester linkages. To synthesize such chirally controlled oligonucleotides, one or more modifying steps are optionally replaced with an oxidation step to install the corresponding phosphate diester linkages. In some embodiments, the oxidation step is performed in a fashion similar to ordinary oligonucleotide synthesis. In some embodiments, an oxidation step comprises the use of I₂. In some embodiments, an oxidation step comprises the use of I₂ and pyridine. In some embodiments, an oxidation step comprises the use of 0.02 M I₂ in a THE/pyridine/water (70:20:10—v/v/v) co-solvent system. An example cycle is depicted in Scheme I-c.

[1382] In some embodiments, a phosphorothioate is directly formed through sulfurization by a sulfurization reagents, e.g., 3-phenyl-1,2,4-dithiazolin-5-one. In some embodiments, after a direct installation of a phosphorothioate, a chiral auxiliary group remains attached to the internucleotidic phosphorus atom. In some embodiments, an additional de-protecting step is required to remove the chiral auxiliary (e.g., for DPSE-type chiral auxiliary, using TBAF, HF-Et₃N, etc.).

[1383] In some embodiments, a phosphorothioate precursor is used to synthesize chirally controlled oligonucleotides comprising phosphorothioate linkages.

[1384] In some embodiments, the provided chirally controlled oligonucleotide comprises one or more phosphate diester linkages and one or more phosphorothioate diester linkages. In some embodiments, the provided chirally controlled oligonucleotide comprises one or more phosphate diester linkages and one or more phosphorothioate diester linkages, wherein at least one phosphate diester linkage is installed after all the phosphorothioate diester linkages when synthesized from 3′ to 5′. To synthesize such chirally controlled oligonucleotides, in some embodiments, one or more modifying steps are optionally replaced with an oxidation step to install the corresponding phosphate diester linkages, and a phosphorothioate precursor is installed for each of the phosphorothioate diester linkages. In some embodiments, a phosphorothioate precursor is converted to a phosphorothioate diester linkage after the desired oligonucleotide length is achieved. In some embodiments, the deprotection/release step during or after cycle exit converts the phosphorothioate precursors into phosphorothioate diester linkages.

[1385] In some embodiments, a phosphorothioate precursor is a phosphorus protecting group as described herein, e.g., 2-cyanoethyl (CE or Cne), 2-trimethylsilylethyl, 2-nitroethyl, 2-sulfonylethyl, methyl, benzyl, o-nitrobenzyl, 2-(p-nitrophenylethyl (NPE or Npe), 2-phenylethyl, 3-(N-tert-butylcarboxamido)-1-propyl, 4-oxopentyl, 4-methylthio-1-butyl, 2-cyano-1,1-dimethylethyl, 4 N methylaminobutyl, 3-(2-pyridyl)-1-propyl, 2-[N-methyl N-(2-pyridyl)]aminoethyl, 2-(N-formyl,N-methyl)aminoethyl, 4-[N-methyl-N-(2,2,2-trifluoroacetyl)amino]butyl. Examples are further depicted below.

[1386] As noted above, in some embodiments, sulfurization occurs under conditions which cleave the chiral reagent from the growing oligonucleotide. In some embodiments, sulfurization occurs under conditions which do not cleave the chiral reagent from the growing oligonucleotide.

[1387] In some embodiments, a sulfurization reagent is dissolved in a suitable solvent and delivered to the column. In certain embodiments, the solvent is a polar aprotic solvent such as a nitrile solvent. In some embodiments, the solvent is acetonitrile, in some embodiments, a solution of sulfurization reagent is prepared by mixing a sulfurization reagent (e.g., a thiosulfonate derivative as described herein) with BSTFA (N,O-bis-trimethylsilyl-trifluoroacetamide) in a nitrile solvent (e.g., acetonitrile). In some embodiments, BSTFA is not included. For example, the present inventors have found that relatively more reactive sulfurization reagents of general formula R^{s2}—S—S(O)₂—R^{s3} can often successfully participate in sulfurization reactions in the absence of BSTFA. To give but one example, the inventors have demonstrated that where R^{s2} is p-nitrophenyl and R^{s3} is methyl then no BSTFA is required. In light of this disclosure, those skilled in the art will readily be able to determine other situations and/or sulfurization reagents that do not require BSTFA.

[1388] In some embodiments, the sulfurization step is performed at room temperature. In some embodiments, the sulfurization step is performed at lower temperatures such as about 0° C., about 5° C., about 10° C., or about 15° C. in some embodiments, the sulfurization step is performed at elevated temperatures of greater than about 20° C.

[1389] In some embodiments, a sulfurization reaction is run for about 1 minute to about 120 minutes. In some embodiments, a sulfurization reaction is run for about 1 minute to about 90 minutes. In some embodiments, a sulfurization reaction is run for about 1 minute to about 60 minutes. In some embodiments, a sulfurization reaction is run for about 1 minute to about 30 minutes. In some embodiments, a sulfurization reaction is run for about 1 minute to about 25 minutes. In some embodiments, a sulfurization reaction is run for about 1 minute to about 20 minutes. In some embodiments, a sulfurization reaction is run for about 1 minute to about 15 minutes. In some embodiments, a sulfurization reaction is run for about 1 minute to about 10 minutes. In some embodiments, a sulfurization reaction is run for about 5 minute to about 60 minutes.

[1390] In some embodiments, a sulfurization reaction is run for about 5 minutes. In some embodiments, a sulfurization reaction is run for about 10 minutes. In some embodiments, a sulfurizalion reaction is run for about 15 minutes. In some embodiments, a sulfurization reaction is run for about 20 minutes. In some embodiments, a sulfurization reaction is run for about 2.5 minutes. In some embodiments, a sulfurization reaction is run for about 30 minutes. In some embodiments, a sulfurization reaction is run for about 35 minutes. In some embodiments, a sulfurization reaction is run for about 40 minutes. In some embodiments, a sulfurization reaction is run for about 45 minutes. In some embodiments, a sulfurization reaction is run for about 50 minutes. In some embodiments, a sulfurization reaction is run for about 55 minutes. In some embodiments, a sulfurization reaction is run for about 60 minutes.

[1391] It was unexpectedly found that certain of the sulfurization modification products made in accordance with methods of the present disclosure are unexpectedly stable. In some embodiments, it the unexpectedly stable products are phosphorothioate triesters. In some embodiments, the unexpectedly stable products are chirally controlled oligonucleotides comprising one or more internucleotidic linkages having the structure of Formula I-c.

[1392] One of skill in the relevant arts will recognize that sulfurization methods described herein and sulfurization reagents described herein are also useful in the context of modifying H-phosphonate oligonucleotides such as those described in Wada II (WO2010/064146).

[1393] In some embodiments, the sulfurization reaction has a stepwise sulfurization efficiency that is at least about 80%, 85%, 90%, 95%, 96%, 97%, or 98%. In some embodiments, the sulfurization reaction provides a crude dinucleotide product composition that is at least 98% pure. In some embodiments, the sulfurization reaction provides a crude tetranucleotide product composition that is at least 90% pure. In some embodiments, the sulfurization reaction provides a crude dodecanucleotide product composition that is at least 70% pure. In some embodiments, the sulfurization reaction provides a crude icosanucleotide product composition that is at least 50% pure.

[1394] Once the step of modifying the linkage phosphorus is complete, the oligonucleotide undergoes another deblock step in preparation for re-entering the cycle. In some embodiments, a chiral auxiliary remains intact after sulfurization and is deblocked during the subsequent deblock step, which necessarily occurs prior to re-entering the cycle. The process of deblocking, coupling, capping and modifying, are repeated until the growing oligonucleotide reaches a desired length, at which point the oligonucleotide can either be immediately cleaved from the solid support or left attached to the support for purification purposes and later cleaved. In some embodiments, one or more protecting groups are present on one or more of the nucleotide bases, and cleavage of the oligonucleotide from the support and deprotection of the bases occurs in a single step. In some embodiments, one or more protecting groups are present on one or more of the nucleotide bases, and cleavage of the oligonucleotide from the support and deprotection of the bases occurs in more than one step. In some embodiments, deprotection and cleavage from the support occurs under basic conditions using, e.g., one or more amine bases. In certain embodiments, the one or more amine bases comprise propyl amine, in certain embodiments, the one or more amine bases comprise pyridine.

[1395] In some embodiments, cleavage from the support and/or deprotection occurs at elevated temperatures of about 30° C. to about 90° C. In some embodiments, cleavage from the support and/or deprotection occurs at elevated temperatures of about 40° C. to about 80° C. In some embodiments, cleavage from the support and/or deprotection occurs at elevated temperatures of about 50° C. to about 70° C. In some embodiments, cleavage from the support and/or deprotection occurs at elevated temperatures of about 60° C. In some embodiments, cleavage from the support and/or deprotection occurs at ambient temperatures.

[1396] Example purification procedures are described herein and/or are known generally in the relevant arts.

[1397] Noteworthy is that the removal of the chiral auxiliary from the growing oligonucleotide during each cycle is beneficial for at least the reasons that (1) the auxiliary will not have to be removed in a separate step at the end of the oligonucleotide synthesis when potentially sensitive functional groups are installed on phosphorus; and (2) unstable phosphorus-auxiliary intermediates prone to undergoing side reactions and/or interfering with subsequent chemistry are avoided. Thus, removal of the chiral auxiliary during each cycle makes the overall synthesis more efficient.

[1398] While the step of deblocking in the context of the cycle is described above, additional general methods are included below.

### Deblocking Step

[1399] In some embodiments, the step of coupling is preceded by a step of deblocking. For instance, in some embodiments, the 5′ hydroxyl group of the growing oligonucleotide is blocked (i.e., protected) and must be deblocked in order to subsequently react with a nucleoside coupling partner.

[1400] In some embodiments, acidification is used to remove a blocking group. In some embodiments, the acid is a Brønsted acid or Lewis acid. Useful Brønsted acids are carboxylic acids, alkylsulfonic acids, arylsulfonic acids, phosphoric acid and its derivatives, phosphonic acid and its derivatives, allylphosphonic acids and their derivatives, arylphosphonic acids and their derivatives, phosphinic acid, dialkylphosphinic acids, and diarylphosphinic acids which have a pKa (25° C. in water) value of −0.6 (trifluoroacetic acid) to 4.76 (acetic acid) in an organic solvent or water (in the case of 80% acetic acid). The concentration of the acid (1 to 80%) used in the acidification step depends on the acidity of the acid. Consideration to the acid strength must be taken into account as strong acid conditions will result in depurination/depyrimidination, wherein purinyl or pyrimidinyl bases are cleaved from ribose ring and or other sugar ring. In some embodiments, an acid is selected from R^{a1}COOH, R^{a1}SO₃H, R^{a3}SO₃H,

[chemical structure]

wherein each of R^{a1} and R^{a2} is independently hydrogen or an optionally substituted alkyl or aryl, and R^{a3} is an optionally substituted alkyl or aryl.

[1401] In some embodiments, acidification is accomplished by a Lewis acid in an organic solvent. Examples of such useful Lewis acids are Zn(X^{a})₂ wherein X^{a} is Cl, Br, T, or CF₃SO₃.

[1402] In some embodiments, the step of acidifying comprises adding an amount of a Brønsted or Lewis acid effective to remove a blocking group without removing purine moieties from the condensed intermediate.

[1403] Acids that are useful in the acidifying step also include, but are not limited to 0.10% phosphoric acid in an organic solvent, 10% hydrochloric acid in an organic solvent, 1% trifluoroacetic acid in an organic solvent, 3% dichloroacetic acid or trichloroacetic acid in an organic solvent or 80% acetic acid in water. The concentration of any Brønsted or Lewis acid used in this step is selected such that the concentration of the acid does not exceed a concentration that causes cleavage of a nucleobase from a sugar moiety.

[1404] In some embodiments, acidification comprises adding 1% trifluoroacetic acid in an organic solvent. In some embodiments, acidification comprises adding about 0.1% to about 8% trifluoroacetic acid in an organic solvent. In some embodiments, acidification comprises adding 3% dichloroacetic acid or trichloroacetic acid in an organic solvent, in some embodiments, acidification comprises adding about 0.1% to about 10% dichloroacetic acid or trichlontacetic acid in an organic solvent. In some embodiments, acidification comprises adding 3% trichloroacetic acid in an organic solvent. In some embodiments, acidification comprises adding about 0.1% to about 10% trichloroacetic acid in an organic solvent. In some embodiments, acidification comprises adding 80% acetic acid in water. In some embodiments, acidification comprises adding about 50% to about 90%, or about 50% to about 80%, about 50% to about 70%, about 50% to about 60%, about 70% to about 90% acetic acid in water. In some embodiments, the acidification comprises the further addition of cation scavengers to an acidic solvent. In certain embodiments, the cation scavengers can be triethylsilane triisopropylsilane. In some embodiments, a blocking group is deblocked by acidification, which comprises adding 1% trifluoroacetic acid in an organic solvent. In some embodiments, a blocking group is deblocked by acidification, which comprises adding 3% dichloroacetic acid in an organic solvent. In some embodiments, a blocking group is deblocked by acidification, which comprises adding 3% trichloroacetic acid in an organic solvent. In some embodiments, a blocking group is deblocked by acidification, which comprises adding 3% trichloroacetic acid in dichloromethane.

[1405] In certain embodiments, methods of the present disclosure are completed on a synthesizer and the step of deblocking the hydroxyl group of the growing oligonucleotide comprises delivering an amount solvent to the synthesizer column, which column contains a solid support to which the oligonucleotide is attached. In some embodiments, the solvent is a halogenated solvent (e.g., dichloromethane). In certain embodiments, the solvent comprises an amount of an acid. In some embodiments, the solvent comprises an amount of an organic acid such as, for instance, trichloroaceticacid. In certain embodiments, the acid is present in an amount of about 1% to about 20% w/v., in certain embodiments, the acid is present in an amount of about 1% to about 10% w/v. In certain embodiments, the acid is present in an amount of about 1% to about 5% w/v, in certain embodiments, the acid is present in an amount of about 1 to about 3% w/v. In certain embodiments, the acid is present in an amount of about 3% w/v. Methods for deblocking a hydroxyl group are described further herein. In some embodiments, the acid is present in 3% w/v is dichloromethane.

[1406] In some embodiments, the chiral auxiliary is removed before the deblocking step. In some embodiments, the chiral auxiliary is removed during the deblocking step.

[1407] In some embodiments, cycle exit is performed before the deblocking step. In some embodiments, cycle exit is preformed after the deblocking step.

### General Conditions for Blocking Group/Protecting Group Removal

[1408] Functional groups such as hydroxyl or amino moieties which are located on nucleobases or sugar moieties are routinely blocked with blocking (protecting) groups (moieties) during synthesis and subsequently deblocked. In general, a blocking group renders a chemical functionality of a molecule inert to specific reaction conditions and can later be removed from such functionality in a molecule without substantially damaging the remainder of the molecule (see e.g., Green and Wuts, Protective Groups in Organic Synthesis, 2nd Ed., John Wiley & Sons, New York, 1991). For example, amino groups can be blocked with nitrogen blocking groups. Chemical functional groups can also be blocked by including them in a precursor form. Thus an azido group can be considered a blocked form of an amine as the azido group is easily converted to the amine. Further representative protecting groups utilized in nucleic acid synthesis are known (see e.g. Agrawal et al., Protocols for Oligonucleotide Conjugates, Eds., Humana Press, New Jersey, 1994, Vol. 26, pp. 1-72).

[1409] Various methods are known and used for removal of blocking groups from nucleic acids. In some embodiments, all blocking groups are removed. In some embodiments, a portion of blocking groups are removed. In some embodiments, reaction conditions can be adjusted to selectively remove certain blocking groups.

[1410] In some embodiments, nucleobase blocking groups, if present, are cleavable with an acidic reagent after the assembly of a provided oligonucleotide, in some embodiment, nucleobase blocking groups, if present, are cleavable under neither acidic nor basic conditions, e.g. cleavable with fluoride salts or hydrofluoric acid complexes. In some embodiments, nucleobase blocking groups, if present, are cleavable in the presence of base or a basic solvent after the assembly of a provided oligonucleotide. In certain embodiments, one or more of the nucleobase blocking groups are characterized in that they are cleavable in the presence of base or a basic solvent after the assembly of a provided oligonucleotide but are stable to the particular conditions of one or more earlier deprotection steps occurring during the assembly of the provided oligonucleotide.

[1411] In some embodiments, blocking groups for nucleobases are not required. In some embodiments, blocking groups for nucleobases are required. In some embodiments, certain nucleobases require one or more blocking groups while other nucleobases do not require one or more blocking groups.

[1412] In some embodiments, the oligonucleotide is cleaved from the solid support after synthesis. In some embodiments, cleavage from the solid support comprises the use of propylamine, in some embodiments, cleavage from the solid support comprises the use of propylamine in pyridine, in some embodiments, cleavage from the solid support comprises the use of 20% propylamine in pyridine, in some embodiments, cleavage from the solid support comprises the use of propylamine in anhydrous pyridine. In some embodiments, cleavage from the solid support comprises the use of 20% propylamine in anhydrous pyridine. In some embodiments, cleavage from the solid support comprises use of a polar aprotic solvent such as acetonitrile, NMP, DMSO, sulfone, and/or lutidine. In some embodiments, cleavage from the solid support comprises use of solvent, e.g., a polar aprotic solvent, and one or more primary amines (e.g., a C₁₋₁₀ amine), and/or one or more of methoxylamine, hydrazine, and pure anhydrous ammonia.

[1413] In some embodiments, deprotection of oligonucleotide comprises the use of propylamine, in some embodiments, deprotection of oligonucleotide comprises the use of propylamine in pyridine. In some embodiments, deprotection of oligonucleotide comprises the use of 20% propylamine in pyridine. In some embodiments deprotection of oligonucleotide comprises the use of propylamine in anhydrous pyridine. In some embodiments, deprotection of oligonucleotide comprises the use of 20% propylamine in anhydrous pyridine.

[1414] In some embodiments, the oligonucleotide is deprotected during cleavage.

[1415] In some embodiments, cleavage of oligonucleotide from solid support, or deprotection of oligonucleotide, is performed at about room temperature. In some embodiments, cleavage of oligonucleotide from solid support, or deprotection of oligonucleotide, is performed at elevated temperature. In some embodiments, cleavage of oligonucleotide from solid support, or deprotection of oligonucleotide, is performed at above about 30° C., 40° C., 50° C., 60° C., 70° C., 80° C. 90° C. or 100° C. in some embodiments, cleavage of oligonucleotide from solid support, or deprotection of oligonucleotide, is performed at about 30° C., 40° C., 50° C. 60° C., 70° C., 80° C. 90° C. or 100° C. In some embodiments, cleavage of oligonucleotide from solid support, or deprotection of oligonucleotide, is performed at about 40-80° C. In some embodiments, cleavage of oligonucleotide from solid support, or deprotection of oligonucleotide, is performed at about 50-70° C. In some embodiments, cleavage of oligonucleotide from solid support, or deprotection of oligonucleotide, is performed at about 60° C.

[1416] In some embodiments, cleavage of oligonucleotide from solid support, or deprotection of oligonucleotide, is performed for more than 0.1 hr, 1 hr, 2 hrs, 5 hrs, 10 hrs, 15 hrs, 20 hrs, 24 hrs, 30 his, or 40 hrs. In some embodiments, cleavage of oligonucleotide from solid support, or deprotection of oligonucleotide, is performed for about 0.1-5 hrs. In some embodiments, cleavage of oligonucleotide from solid support, or deprotection of oligonucleotide, is performed for about 3-10 hrs. In some embodiments, cleavage of oligonucleotide from solid support, or deprotection of oligonucleotide, is performed for about 5-1.5 hrs. In some embodiments, cleavage of oligonucleotide from solid support, or deprotection of oligonucleotide, is performed for about 10-20 hrs. In some embodiments, cleavage of oligonucleotide from solid support, or deprotection of oligonucleotide, is performed for about 15-25 hrs. in some embodiments, cleavage of oligonucleotide from solid support, or deprotection of oligonucleotide, is performed for about 20-40 hrs. in some embodiments, cleavage of oligonucleotide from solid support, or deprotection of oligonucleotide, is performed for about 2 hrs. In some embodiments, cleavage of oligonucleotide from solid support, or deprotection of oligonucleotide, is performed for about 5 hrs. In some embodiments, cleavage of oligonucleotide from solid support, or deprotection of oligonucleotide, is performed for about 10 hrs. In some embodiments, cleavage of oligonucleotide from solid support, or deprotection of oligonucleotide, is performed for about 15 hrs. In some embodiments, cleavage of oligonucleotide from solid support, or deprotection of oligonucleotide, is performed for about 18 hrs. in some embodiments, cleavage of oligonucleotide from solid support, or deprotection of oligonucleotide, is performed for about 24 hrs.

[1417] In some embodiments, cleavage of oligonucleotide from solid support, or deprotection of oligonucleotide, is performed at room temperature for more than 0.1 hr, 1 hr, 2 hrs, 5 hrs, 10 hrs, 15 his, 20 hrs, 24 hrs, 30 hrs, or 40 his. In some embodiments, cleavage of oligonucleotide from solid support, or deprotection of oligonucleotide, is performed at room temperature for about 5-48 his. In some embodiments, cleavage of oligonucleotide from solid support, or deprotection of oligonucleotide, is performed at room temperature for about 10-24 hrs. In some embodiments, cleavage of oligonucleotide from solid support, or deprotection of oligonucleotide, is performed at room temperature for about 18 his. In some embodiments, cleavage of oligonucleotide from solid support, or deprotection of oligonucleotide, is performed at elevated temperature for more than 0.1 hr, 1 hr, 2 hrs, 5 hrs, 10 hrs, 15 hrs, 20 hrs, 24 his, 30 his, or 40 hrs. In some embodiments, cleavage of oligonucleotide from solid support, or deprotection of oligonucleotide, is performed at elevated temperature for about 0.5-5 hrs. In some embodiments, cleavage of oligonucleotide from solid support, or deprotection of oligonucleotide, is performed at about 60° C. for about 0.5-5 hrs. in some embodiments, cleavage of oligonucleotide from solid support, or deprotection of oligonucleotide, is performed at about 60° C. for about 2 hrs.

[1418] In some embodiments, cleavage of oligonucleotide from solid support, or deprotection of oligonucleotide comprises the use of propylamine and is performed at room temperature or elevated temperature for more than 0.1 hr, 1 hr. 2 hrs. 5 hrs, 0.10 hrs, 15 hrs, 20 hrs, 24 hrs, 30 hrs, or 40 hrs. Example conditions are 20% propylamine in pyridine at room temperature for about 18 hrs, and 20% propylamine in pyridine at 60° C. for about 18 hrs.

[1419] In some embodiments, prior to cleavage from solid support, a step is performed to remove a chiral auxiliary group, if one is still attached to an internucleotidic phosphorus atom. In some embodiments, for example, one or more DPSE type chiral auxiliary groups remain attached to internucleotidic phosphorus atoms during the oligonucleotide synthesis cycle. Suitable conditions for removing remaining chiral auxiliary groups are widely known in the art, e.g., those described in Wada I, Wada II, Wada III, Chiral Control, etc. In some embodiments, a condition for removing DPSE type chiral auxiliary is TBAF or ITF-Et₃N, e.g., 0.1M TBAF in MeCN, 0.5M HF-Et₃N in THE or MeCN, etc. In some embodiments, the present disclosure recognizes that a linker may be cleaved during the process of removing a chiral auxiliary group. In some embodiments, the present disclosure provides linkers, such as the SP linker, that provides better stability during chiral auxiliary group removal. Among other things, certain linkers provided by the present disclosure provided improved yield and/or purity.

[1420] In some embodiments, an example cycle is depicted in Scheme I.

[chemical structure]

[1421] In some embodiments, X is H or a 2′-modification. In some embodiments, X is H or—OR′, wherein R¹ is not hydrogen. In some embodiments, X is H or —OR′, wherein R¹ is optionally substituted C₁₋₆ alkyl. In some embodiments, X is H. In some embodiments, X is —OMe. In some embodiments, X is —OCH₂CH₂OCH₃. In some embodiments, X is —F.

[1422] It is understood by a person having ordinary skill in the art that different types of cycles may be combined to provide complete control of the chemical modifications and stereochemistry of oligonucleotides. In some embodiments, for example, a PNPLA3 oligonucleotide synthesis process may contain one or more Cycles. In some embodiments, a provided method comprises at least one cycle using a DPSE-type chiral auxiliary.

[1423] In some embodiments, the present disclosure provides methods for preparing provided oligonucleotide and oligonucleotide compositions. In some embodiments, a provided method comprises the step of providing a provided chiral reagent having the structure of

[chemical structure]

wherein W¹ is —NG⁵, W² is O, each of G¹ and G³ is independently hydrogen or an optionally substituted group selected from C₁₋₁₀, aliphatic, heterocyclyl, heteroaryl and aryl, G² is —C(R)₂Si(R)₃, and G⁴ and G⁵ are taken together to form an optionally substituted saturated, partially unsaturated or unsaturated heteroatom-containing ring of up to about 20 ring atoms which is monocyclic or polycyclic, fused or unfused, wherein each R is independently hydrogen, or an optionally substituted group selected from C₁-C₄ aliphatic, carbocyclyl, aryl, heteroaryl, and heterocycyl. In some embodiments, a provided chiral reagent has the structure of

[chemical structure]

In some embodiments, a provided methods comprises providing a phosphoramidite comprising a moiety from a chiral reagent having the structure of

[chemical structure]

wherein -W¹H and —W²H, or the hydroxyl and amino groups, form bonds with the phosphorus atom of the phosphoramidite. In some embodiments, -W¹H and —W²H, or the hydroxyl and amino groups, form bonds with the phosphorus atom of the phosphoramidite, e.g., in

[chemical structure]

In some embodiments, a phosphoramidite has the structure of

[chemical structure]

[chemical structure]

[chemical structure]

[chemical structure]

In some embodiments, R is a protection group. In some embodiments, R is DMTr. In some embodiments, G² is —C(R)₂Si(R)₃, wherein —C(R)₂— is optionally substituted —CH₂, and each R of —Si(R)₃ is independently an optionally substituted group selected from C₁₋₁₀ aliphatic, heterocyclyl, heteroaryl and aryl. In some embodiments, at least one R of —Si(R)₃ is independently optionally substituted C₁₋₁₀ alkyl. In some embodiments, at least one R of —Si(R)₃ is independently optionally substituted phenyl, in some embodiments, one R of —Si(R)₃ is independently optionally substituted phenyl, and each of the other two R is independently optionally substituted C₁₋₁₀ alkyl. In some embodiments, one R of —Si(R)₃ is independently optionally substituted C₁₋₁₀ alkyl, and each of the other two R is independently optionally substituted phenyl. In some embodiments, G² is optionally substituted —CH₂Si(Ph)(Me)₂, in some embodiments, G² is optionally substituted —CH₂Si(Me)(Ph)₂, in some embodiments, G² is —CH₂Si(Me)(Ph)₂. In some embodiments, G⁴ and G⁵ are taken together to form an optionally substituted saturated 5-6 membered ring containing one nitrogen atom (to which G⁵ is attached). In some embodiments, G⁴ and G⁵ are taken together to form an optionally substituted saturated 5-membered ring containing one nitrogen atom. In some embodiments, G is hydrogen, in some embodiments, G³ is hydrogen. In some embodiments, both G¹ and G; are hydrogen. In some embodiments, both. G¹ and G³ are hydrogen, G² is —C(R)₂Si(R)₃, wherein —C(R)₂— is optionally substituted —CH₂, and each R of —Si(R)₃ is independently an optionally substituted group selected from C₁₋₁₀ aliphatic, heterocyclyl, heteroaryl and aryl, and G⁴ and G⁵ are taken together to form an optionally substituted saturated 5-membered ring containing one nitrogen atom. In some embodiments, a provided method further comprises providing a fluoro-containing reagent. In some embodiments, a provided fluoro-containing reagent removes a chiral reagent, or a product formed from a chiral reagent, from oligonucleotides after synthesis. Various known fluoro-containing reagents, including those F⁻ sources for removing —SiR₃ groups, can be utilized in accordance with the present disclosure, for example, TBAF, HF₃-Et₃N etc. In some embodiments, a fluoro-containing reagent provides better results, for example, shorter treatment time, lower temperature, less de-sulfurization, etc, compared to traditional methods, such as concentrated ammonia. In some embodiments, for certain fluoro-containing reagent, the present disclosure provides linkers for improved results, for example, less cleavage of oligonucleotides from support during removal of chiral reagent (or product formed therefrom during oligonucleotide synthesis). In some embodiments, a provided linker is an SP linker. In some embodiments, the present disclosure demonstrated that a HF-base complex can be utilized, such as HF—NR₃, to control cleavage during removal of chiral reagent (or product formed therefrom during oligonucleotide synthesis). In some embodiments, HF—NR₃ is HF-NEt₃. In some embodiments, HF—NR₃ enables use of traditional linkers, e.g., succinyl linker.

[1424] In some embodiments, a method for production of a PNPLA3 oligonucleotide comprises at least one cycle using a DPSE-type chiral auxiliary, such as that shown in the following non-limiting example:

[chemical structure]

[1425] Detritylation:

[1426] The synthesis of an oligonucleotide started with 2′-F-U-DMTr loaded CPG solid support (3% dichloroacetic acid (DCA) in toluene was used for the removal of dimethoxy trityl group (DMTr) from the initial nucleobase attached on the solid support followed by an UV watch command mode at the wavelength of 436 nm. Linear flowrate, 424 cm/hr, used for detritylation.

[1427] Coupling:

[1428] For the coupling step, all amidites were dissolved either in acetonitrile (ACN) or in 20% isobutyronitrile (IBN)/ACN at a concentration of 0.2M; the solutions were dried over molecular sieves (3A) NLT 4 h before use (10%, v/v). Dual activators (CMIMT and ETT) coupling approach were utilized for the manufacture of an oligonucleotide. Both activators were dissolved in ACN at a concentration of 0.6M CMIMT has been used for the efficient coupling of stereo defined nucleotides and ETT is an activator used for the coupling of random/standard amidites/nucleotides. 2.5 equivalent of amidites used for coupling of stereo defined nucleotide over 10 min recycle time (linear recycle mode, 212 cm/hr). The molar ratio of CMIMT activator to stereo defined amidite was maintained at 6.1:1 (CMIMT/Amidite=6.1/1) in the coupling step. All random amidites were coupled for 8 min with FIT activator. The molar ratio of ETF to random/standard amidites was 4.5:1.

[1429] Cap 1:

[1430] Cap 1 is a step that is performed before thiolation. 1-1.5 CV Cap B solution is used over 4 min contact time for capping of the auxiliary amine on DPSE. Capping of DPSE chiral auxiliary with Cap B solution helps to reduce the content of early failure and post FLP impurities.

[1431] Thiolation:

[1432] Following the Cap 1 step, the phosphorous triester linkages, P(III), were stabilized with thiolating reagent, 0.2M xanthane hydride (XH) in pyridine, (0.6 CV) over 6 min contact time to form a stable P(V) bond.

[1433] Oxidation:

[1434] It is noted here that the Cap 1 step is not necessary for standard nucleotide cycle. So, after coupling of standard nucleotides onto the solid support, the phosphorous triester linkages, P(III), were oxidized with 0.05M of iodine/water/pyridine solution (3.5 eq.) over 2 min contact time to form a stable P(V) bond.

[1435] Cap 2 (Post-Thio/Ox-Capping):

[1436] In general, 97-100% coupling efficiency was observed in the coupling step based on DMTr release cation. Residual uncoupled hydroxyl groups, typically 1-3% by detrit monitor, on the solid support were blocked with Cap A and Cap B solution using 0.4 CV over 0.8 min to prevent formation of deletion sequences. In case, any auxiliary amine remained un-capped in the pre-capping step will also be capped in this step.

[1437] Cycle Repeated

[1438] The synthetic cycle (DPSE cycle=Detritylation->Coupling->Cap 1->Thiolation->Cap2 and Standard cycle=Detritylation->Coupling->Oxidation->Cap2) was repeated until the desired length of oligonucleotide synthesized on the solid support.

[1439] In some embodiments, the present disclosure comprises a method for manufacturing a PNPLA3 oligonucleotide composition directed to a selected target sequence, the method comprising manufacturing a provided oligonucleotide composition capable of directing single-stranded RNA interference and comprising a first plurality of oligonucleotides, each of which has a base sequence complementary to the target sequence. In some embodiments, a provided method further comprises providing a pharmaceutically acceptable carrier.

[1440] As appreciated by a person having ordinary skill in the art, provided oligonucleotides can also be prepared through known solution phase synthesis using provided reagents and methods in accordance with the present disclosure.

[1441] As non-limiting examples, provided oligonucleotides can also be prepared through any process known in the art, including but not limited to, those described in: JP 4348044; WO2005092909; U.S. Pat. No. 9,394,333; WO2011005761; U.S. Pat. Nos. 8,470,987; 8,859,755; 8,822,671; WO2013012758; ET 13817386; WO20140.12081; WO2015107425; WO2017015555; and WO2017062862.

[1442] Double-stranded oligonucleotides comprising a single-stranded oligonucleotide disclosed herein

[1443] In some embodiments, a PNPLA3 oligonucleotide is a single-stranded or double-stranded oligonucleotide. In some embodiments, the disclosure encompasses a double-stranded oligonucleotide or molecule comprising a single-stranded oligonucleotide as disclosed herein, and another oligonucleotide which is at least partially complementary to it, in some embodiments, the present disclosure pertains to compositions comprising such a double-stranded oligonucleotide.

[1444] In some embodiments, the disclosure encompasses a double-stranded molecule comprising a single-stranded oligonucleotide as disclosed herein, and another oligonucleotide which is at least partially complementary to it, e.g., one or both ends of the molecule has a 3′ or 5′ overhang.

[1445] In some embodiments, the disclosure encompasses a double-stranded molecule comprising a single-stranded oligonucleotide as disclosed herein, and another oligonucleotide which is fully complementary to it.

[1446] In some embodiments, the disclosure encompasses a double-stranded molecule capable of directing RNA interference comprising a single-stranded oligonucleotide as disclosed herein, and another oligonucleotide which is at least partially complementary to it.

[1447] In some embodiments, the disclosure encompasses a double-stranded molecule capable of directing RNA interference comprising a single-stranded oligonucleotide as disclosed herein, and another oligonucleotide which is at least partially complementary to it, e.g., one or both ends of the molecule capable of directing RNA interference has a 3′ or 5′ overhang.

[1448] In some embodiments, the disclosure encompasses a double-stranded molecule capable of directing RNA interference comprising a single-stranded oligonucleotide as disclosed herein, and another oligonucleotide which is fully complementary to it.

[1449] In some embodiments, the disclosure encompasses a double-stranded molecule capable of directing RNA interference and RNase H-mediated knockdown comprising a single-stranded oligonucleotide as disclosed herein, and another oligonucleotide which is at least partially complementary to it.

[1450] In some embodiments, the disclosure encompasses a double-stranded molecule capable of directing RNA interference and RNase H-mediated knockdown comprising a single-stranded oligonucleotide as disclosed herein, and another oligonucleotide which is at least partially complementary to it, e.g., one or both ends of the molecule capable of directing RNA interference and RNase H-mediated knockdown has a 3′ or 5′ overhang.

[1451] In some embodiments, the disclosure encompasses a double-stranded molecule capable of directing RNA interference and RNase H-mediated knockdown comprising a single-stranded oligonucleotide as disclosed herein, and another oligonucleotide which is fully complementary to it.

[1452] Provided first oligonucleotides and oligonucleotide compositions can have any format, structural element or base sequence of any oligonucleotide disclosed herein, and further comprise a second oligonucleotide or oligonucleotide strand at least partially complementary to the first oligonucleotide. In some embodiments, the first and/or second oligonucleotide can comprise any format, structural element or base sequence of (or a base sequence at least partially complementary to a base sequence of) any oligonucleotide disclosed herein. In some embodiments, a structural element is a 5′-end structure, 5′-end region, 5′-nucleotide, seed region, post-seed region, 3′-end region, 3′-terminal dinucleotide, 3′-end cap, or any portion of any of these structures, GC content, long GC stretch, and/or any modification, chemistry, stereochemistry, pattern of modification, chemistry or stereochemistry, or additional chemical moiety (e.g., including but not limited to, a targeting moiety, a lipid moiety, a GalNAc moiety, a carbohydrate moiety, etc.), any component, or any combination of any of the above.

### Biological Applications

[1453] As described herein, provided compositions and methods are capable of improving knockdown, including, single-stranded RNA interference of transcripts. In some embodiments, provided compositions and methods provide improved single-stranded RNA interference of transcripts compared to a reference pattern, which is a pattern from a reference condition selected from the group consisting of absence of the composition, presence of a reference composition, and combinations thereof. An improvement can be an improvement of any desired biological functions.

[1454] In some embodiments, the present disclosure provides a method for improving single-stranded RNA interference of a target transcript, comprising administering a composition comprising a first plurality of oligonucleotides, wherein the single-stranded RNA interference of the target transcript is improved relative to reference conditions selected from the group consisting of absence of the composition, presence of a reference composition, and combinations thereof.

[1455] In some embodiments, the present disclosure provides a method of mediating single-stranded RNA interference of a target, the method comprising steps of:

[1456] contacting a single-stranded RNA interference system containing the target transcript with a PNPLA3 oligonucleotide composition comprising a first plurality of oligonucleotides, in an amount, for a time, and under conditions sufficient for a set of single-stranded RNA interference products to be generated that is different from a set generated under reference conditions selected from the group consisting of absence of the composition, presence of a reference composition, and combinations thereof.

[1457] In some embodiments, the present disclosure provides compositions and methods for treating or preventing diseases, including but not limited to those described in references cited in this disclosure.

[1458] In some embodiments, the present disclosure provides a method for treating or preventing a disease, comprising administering to a subject a PNPLA3 oligonucleotide composition described herein.

[1459] In some embodiments, the present disclosure provides a method for treating or preventing a disease, comprising administering to a subject a PNPLA3 oligonucleotide composition comprising a first plurality of oligonucleotides, which:
[1460] 1) have a common base sequence complementary to a target sequence in a transcript; and
[1461] 2) comprise one or more modified sugar moieties and modified internucleotidic linkages,
[1462] the oligonucleotide composition being characterized in that, when it is contacted with the transcript in a single-stranded RNA interference system, RNAi-mediated knockdown of the transcript is improved relative to that observed under reference conditions selected from the group consisting of absence of the composition, presence of a reference composition, and combinations thereof.

[1463] In some embodiments, the present disclosure provides a method for treating or preventing a disease, comprising administering to a subject a PNPLA3 oligonucleotide composition comprising a first plurality of oligonucleotides capable of directing single-stranded RNA interference, wherein oligonucleotides are of a particular oligonucleotide type defined by:
[1464] 1) base sequence;
[1465] 2) pattern of backbone linkages;
[1466] 3) pattern of backbone chiral centers; and
[1467] 4) pattern of backbone phosphorus modifications,
   which composition is chirally controlled in that it is enriched, relative to a substantially racemic preparation of oligonucleotides having the same base sequence, for oligonucleotides of the particular oligonucleotide type, wherein:
[1468] the oligonucleotide composition being characterized in that, when it is contacted with the transcript in a single-stranded RNA interference system, RNAi-mediated knockdown of the transcript is improved relative to that observed under reference conditions selected from the group consisting of absence of the composition, presence of a reference composition, and combinations thereof.

[1469] In some embodiments, a disease is one in which administering a provided composition capable of directing single-stranded RNA interference can repair, restore or introduce a new beneficial function.

[1470] In some embodiments, a disease is one in which, after administering a provided composition, a gene is effectively knocked down by improving single-stranded RNA interference system of the gene transcript.

[1471] In some embodiments, a disease is cancer.

[1472] In some embodiments, the present disclosure provides a method of treating a disease by administering a composition comprising a first plurality of oligonucleotides sharing a common base sequence comprising a common base sequence, which nucleotide sequence is complementary to a target sequence in the target transcript,

[1473] the improvement that comprises using as the oligonucleotide composition a stereocontrolled oligonucleotide composition characterized in that, when it is contacted with the transcript in a PNPLA3 oligonucleotide or a single-stranded RNA interference system, RNAi-mediated knockdown of the transcript is improved relative to that observed under reference conditions selected from the group consisting of absence of the composition, presence of a reference composition, and combinations thereof.

[1474] In some embodiments, a disease is cancer.

[1475] In some embodiments, a disease treatment comprises knockdown of a gene function by improving single-stranded RNA interference system.

[1476] In some embodiments, a PNPLA3 oligonucleotide or a single-stranded RNAi agent targets a target mRNA transcript.

[1477] In some embodiments, the common base sequence is capable of hybridizing with a transcript in a cell. In some embodiments, a common base sequence hybridizes with a transcript of any gene described herein or known in the art.

[1478] Treatment of Disorders

[1479] In some embodiments, provided oligonucleotides are capable of directing a decrease in the expression and/or level of a target gene or its gene product. In some embodiments, provided oligonucleotides are capable of directing a decrease in the expression and/or level of a target gene or its gene product via RNA interference. In some embodiments, provided oligonucleotides are capable of directing a decrease in the expression and/or level of a target gene or its gene product via a biochemical mechanism which does not involve RNA interference or RISC (including, but not limited to, RNaseH-mediated knockdown or steric hindrance of gene expression). In some embodiments, provided oligonucleotides are capable of directing a decrease in the expression and/or level of a target gene or its gene product via RNA interference and/or RNaseH-mediated knockdown. In some embodiments, provided oligonucleotides are capable of directing a decrease in the expression and/or level of a target gene or its gene product by sterically blocking translation after annealing to a target gene mRNA, and/or by altering or interfering with mRNA splicing and/or exon inclusion or exclusion.

[1480] In some embodiments, provided oligonucleotides target PNPLA3.

[1481] In some embodiments, PNPLA3 is a gene, or a gene product thereof (including, but not limited to, a transcript or protein), also known as: PNPLA3, adiponutrin, ADPN, C22orf20, acylglycerol O-acyltransferase or calcium-independent phospholipase A2-epsilon, iPLA(2)epsilon, patatin-like phospholipase domain-containing 3; External IDs: MGI: 21517%; HomoloGene: 11883; GeneCards: PNPLA3; Species; Human: Entrez; 80339; Ensembl; ENSG00000100344; UniProt; Q9NST1; RefSeq (mRNA); NM_025225; RefSeq (protein); NP_079501; Location (UCSC); Chr 22: 43.92-43.96 Mb; Species; Mouse: Entrez; 116939; Ensembl; ENSMUSG00000041653; UniProt; Q91WW7; RefSeq (mRNA); NM_054088; RefSeq (protein); NP 473429.2 NP 473429; Location (UCSC); Chr 15: 84.17-84.19 Mb. Patatin-like phospholipase domain-containing protein 3 (PNPLA3) also known as adiponutrin (ADPN), acylglycerol O-acyltransferase or calcium-independent phospholipase A2-epsilon (iPLA2-epsilon) is reportedly an enzyme that in humans is encoded by the PNPLA3 gene. PNPLA3 encodes a 481 amino acid protein that belongs to the patatin-like phospholipase family. The progenitor of this family, patatin, is reportedly a major protein of potato tubers and has nonspecific lipid acyl hydrolase activity. A variant (T148M) in PNPLA3 (Patatin-like phospholipase domain containing 3) was reportedly strongly associated with increased hepatic fat levels and with hepatic inflammation. A marker of PNPLA3-1148M is reportedly SNP rs738409. The association between PNPLA3-I148M and hepatic fat content reportedly remained highly significant after adjusting for BMI, diabetes status, ethanol use, as well as global and local ancestry, and was associated with a significant increase in liver TG content in all three ethnic groups. The frequencies of the PNPLA3-1148M allele reportedly mirrored the relative prevalence of NAFLD in the three ethnic groups; the highest frequency was in Hispanics (0.49), with lower frequencies observed in European Americans (0.23) and African-Americans (0.17). Collins et al. 2003 Genome Res. 13 (1): 27-36; Collins et al. 2005 Genome Biol. 5 (10): R84; Dunham et al. 1999 Nature. 402 (6761): 489-95; Gerhard et al. 2004 Genome Res. 14 (10B): 2121-7; Jenkins et al. 2005 J. Biol. Chem. 279 (47): 48968-75; Kienesberger et al. 2009 J. Lipid Res. 50 Suppl.: S63-8; Lake et al. 2006 J. Lipid Res. 46 (11): 2477-87; Liu et al. 2004 J. Clin. Endocrinol. Metab. 89 (6): 2684-9; Strausberg et al. 2003 Proc. Natl. Acad. Sci U.S.A. 99 (26): 16899-903; Wilson et al. 2006 J. Lipid Res. 47 (9): 1940-9.

[1482] In some embodiments, a PNPLA3-related disorder is a disorder related to, caused and/or associated with abnormal or excessive activity, level and/or expression or abnormal tissue or inter- or intracellular distribution of an PNPLA3 gene or a gene product thereof. Non-limiting examples of an PNPLA3-related disorder include: liver disease, fatty liver (e.g., accumulation of fat in the liver, or an increase in or supra-normal hepatic fat), hepatic steatosis (e.g., simple fatty liver), steatohepatitis, hepatitis, nonalcoholic fatty liver disease (e.g., NAFLD), and/or one or more disease and/or one or more symptom or condition associated with or secondary to a liver disease, including but not limited to: inflammation, destruction of liver cells (e.g., hepatocellular necrosis), scarring of the liver (e.g., fibrosis), irreversible, advanced scarring of the liver (e.g., cirrhosis), insulin resistance, diabetes, dyslipidemia, increased protein activity in the hedgehog (Hh) signaling pathway, fatigue, weakness, nausea, abdominal pain, spider-like blood vessels, jaundice, itching, edema, ascites, mental confusion, obesity, hepatocellular carcinoma.

[1483] In some embodiments, non-limiting examples of a PNPLA3-related disorder include: hyperlipidemia, Type I diabetes, Type TT diabetes mellitus, idiopathic Type I diabetes (Type Ib), latent autoimmune diabetes in adults (LADA), early-onset Type 2 diabetes (EOD), youth-onset atypical diabetes (YOAD), maturity onset diabetes of the young (MODY), malnutrition-related diabetes, gestational diabetes, coronary heart disease, ischemic stroke, restenosis after angioplasty, peripheral vascular disease, intermittent claudication, myocardial infarction, dyslipidemia, post-prandial lipemia, conditions of impaired glucose tolerance (IGT), conditions of impaired fasting plasma glucose, metabolic acidosis, ketosis, arthritis, obesity, osteoporosis, hypertension, congestive heart failure, left ventricular hypertrophy, peripheral arterial disease, diabetic retinopathy, macular degeneration, cataract, diabetic nephropathy, glomerulosclerosis, chronic renal failure, diabetic neuropathy, metabolic syndrome, syndrome X, premenstrual syndrome, angina pectoris, thrombosis, atherosclerosis, transient ischemic attacks, stroke, vascular restenosis, hyperglycemia, hyperinsulinemia, hypertriglyceridemia, insulin resistance, impaired glucose metabolism, erectile dysfunction, skin and connective tissue disorders, foot ulcerations and ulcerative colitis, endothelial dysfunction and impaired vascular compliance, hyperapo B lipoproteinemia, Alzheimer's, schizophrenia, impaired cognition, inflammatory bowel disease, ulcerative colitis, Crohn's disease, and irritable bowel syndrome, non-alcoholic steatohepatitis (NASH), or non-alcoholic fatty liver disease (NAFLD).

[1484] In some embodiments, non-limiting examples of a PNPLA3-related disorder include: fatty liver, nonalcoholic fatty liver disease, nonalcoholic steatohepatitis, nonalcoholic steatohepatitis with liver fibrosis, nonalcoholic steatohepatitis with cirrhosis, or nonalcoholic steatohepatitis with cirrhosis and hepatocellular carcinoma.

[1485] The present disclosure pertains to methods of using oligonucleotides disclosed herein which are capable of targeting PNPLA3 and useful for treating and/or manufacturing a treatment for a PNPLA3-related disorder. In some embodiments, a base sequence of a PNPLA3 oligonucleotide or a single-stranded RNAi agent can comprise or consist of a base sequence which has a specified maximum number of mismatches from a specified base sequence.

[1486] Treatment of a PNPLA3—Related Disorder

[1487] In some embodiments, the present disclosure pertains to a PNPLA3 oligonucleotide which targets PNPLA3 (e.g., a PNPLA3 oligonucleotide comprising a PNPLA3 target sequence or a sequence complementary to a PNPLA3 target sequence). In some embodiments, the present disclosure pertains to a PNPLA3 oligonucleotide which directs target-specific knockdown of PNPLA3. In some embodiments, the present disclosure pertains to a PNPLA3 oligonucleotide which directs target-specific knockdown of PNPLA3 mediated by RNaseH and/or RNA interference. Various such oligonucleotides capable of targeting PNPLA3 are disclosed heron.

[1488] In some embodiments, non-limiting examples of an PNPLA3-related disorder include: liver disease, fatty liver (e.g., accumulation of fat in the liver, or an increase in or supra-normal hepatic fat), hepatic steatosis (e.g., simple fatty liver), steatohepatitis, hepatitis, nonalcoholic fatty liver disease (e.g., NAFLD), and/or one or more disease and/or one or more symptom or condition associated with or secondary to a liver disease, including but not limited to: inflammation, destruction of liver cells (e.g., hepatocellular necrosis), scarring of the liver (e.g., fibrosis), irreversible, advanced scarring of the liver (e.g., cirrhosis), insulin resistance, diabetes, dyslipidemia, increased protein activity in the hedgehog (Hh) signaling pathway, fatigue, weakness, nausea, abdominal pain, spider-like blood vessels, jaundice, itching edema, ascites, mental confusion, obesity, hepatocellular carcinoma.

[1489] In some embodiments, the present disclosure pertains to a method of treating or ameliorating an PNPLA3-related disorder in a patient thereof, the method comprising the step of administering to the patient a therapeutically effective amount of a PNPLA3 oligonucleotide which targets PNPLA3.

[1490] In some embodiments, the present disclosure pertains to a method of treating or ameliorating an PNPLA3-related disorder in a patient thereof, the method comprising the step of administering to the patient a therapeutically effective amount of a PNPLA3 oligonucleotide which targets PNPLA3, wherein the PNPLA3-related disorder is selected from: liver disease, fatty liver, steatosis, steatohepatitis, hepatitis, and nonalcoholic fatty liver disease.

[1491] In some embodiments, the present disclosure pertains to a method for introducing a PNPLA3 oligonucleotide that decreases PNPLA3 gene expression into a cell, the method comprising contacting the cell with a PNPLA3 oligonucleotide. In some embodiments, the oligonucleotide is an antisense oligonucleotide or single-stranded RNAi agent.

[1492] In some embodiments, the present disclosure pertains to a method for decreasing PNPLA3 gene expression in a mammal in need thereof, the method comprising: administering to the mammal a nucleic acid-lipid particle comprising a PNPLA3 oligonucleotide which targets PNPLA3. In some embodiments, the oligonucleotide is an antisense oligonucleotide or single-stranded RNAi agent.

[1493] In some embodiments, the present disclosure pertains to a method for the in vivo delivery of a PNPLA3 oligonucleotide that targets PNPLA3 gene expression, the method comprising: administering to a mammal a PNPLA3 oligonucleotide which targets PNPLA3. In some embodiments, the oligonucleotide is an antisense oligonucleotide or single-stranded RNAi agent. In some embodiments, the mammal is a human. In some embodiments, the mammal is afflicted with and/or suffering from a PNPLA3-related disorder. In some embodiments, the mammal is afflicted with and/or suffering from a PNPLA3-related disorder selected from: liver disease, fatty liver, steatosis, steatohepatitis, hepatitis, and nonalcoholic fatty liver disease.

[1494] In some embodiments, the method of the present disclosure is for the treatment of hyperlipidemia, Type I diabetes, Type TT diabetes mellitus, idiopathic Type I diabetes (Type Ib), latent autoimmune diabetes in adults (LADA), early-onset Type 2 diabetes (EOD), youth-onset atypical diabetes (YOAD), maturity onset diabetes of the young (MODY), malnutrition-related diabetes, gestational diabetes, coronary heart disease, ischemic stroke, restenosis after angioplasty, peripheral vascular disease, intermittent claudication, myocardial infarction, dyslipidemia, post-prandial lipemia, conditions of impaired glucose tolerance (1GT), conditions of impaired fasting plasma glucose, metabolic acidosis, ketosis, arthritis, obesity, osteoporosis, hypertension, congestive heart failure, left ventricular hypertrophy, peripheral arterial disease, diabetic retinopathy, macular degeneration, cataract, diabetic nephropathy, glomerulosclerosis, chronic renal failure, diabetic neuropathy, metabolic syndrome, syndrome X, premenstrual syndrome, angina pectoris, thrombosis, atherosclerosis, transient ischemic attacks, stroke, vascular restenosis, hyperglycemia, hyperinsulinemia, hypertriglyceridemia, elevated low density lipoprotein (LDL) cholesterol levels (hypercholesterolemia), insulin resistance, impaired glucose metabolism, erectile dysfunction, skin and connective tissue disorders, foot ulcerations and ulcerative colitis, endothelial dysfunction and impaired vascular compliance, hyper apo B lipoproteinemia, Alzheimer's, schizophrenia, impaired cognition, inflammatory bowel disease, ulcerative colitis, Crohn's disease, and irritable bowel syndrome, non-alcoholic steatohepatitis (NASH), or non-alcoholic fatty liver disease (NAFLD), in humans wherein the method comprises administering to a subject a therapeutically effective amount of a PNPLA3 oligonucleotide of the present disclosure.

[1495] In some embodiments, the method reduces portal hypertension, hepatic protein synthetic capability, hyperbilirubinemia, or encephalopathy wherein the method comprise administering to a subject a therapeutically effective amount of a PNPLA3 oligonucleotide of the present disclosure.

[1496] The present disclosure is also directed at a method for the treatment of reduction of at least one point in severity of nonalcoholic fatty liver disease or non-alcoholic steatohepatitis grading scoring systems, reduction of the level of serum markers of non-alcoholic steatohepatitis activity, reduction of non alcoholic steatohepatitis disease activity or reduction in the medical consequences of non-alcoholic steatohepatitis in humans administering to a subject a therapeutically effective amount of a PNPLA3 oligonucleotide of the present disclosure.

[1497] In some embodiments, the present disclosure pertains to a method for treating and/or ameliorating one or more symptoms associated with a PNPLA3-related disorder in a mammal in need thereof, the method comprising: administering to the mammal a therapeutically effective amount of a PNPLA3 oligonucleotide which targets PNPLA3, in some embodiments, the present disclosure pertains to a method for reducing susceptibility to a PNPLA3-related disorder in a mammal in need thereof, the method comprising: administering to the mammal a therapeutically effective amount of a PNPLA3 oligonucleotide which targets PNPLA3. In some embodiments, the present disclosure pertains to a method for preventing or delaying the onset of a PNPLA3-related disorder in a mammal in need thereof, the method comprising administering to the mammal a therapeutically effective amount of a PNPLA3 oligonucleotide which targets PNPLA3. In some embodiments, the present disclosure pertains to a method for treating and/or ameliorating one or more symptoms associated with a PNPLA3-related disorder in a mammal in need thereof, the method comprising: administering to the mammal a therapeutically effective amount of a nucleic acid-lipid particle comprising a PNPLA3 oligonucleotide which targets PNPLA3. In some embodiments, the present disclosure pertains to a method for reducing susceptibility to a PNPLA3-related disorder in a mammal in need thereof, the method comprising: administering to the mammal a therapeutically effective amount of a nucleic acid-lipid particle comprising a PNPLA3 oligonucleotide which targets PNPLA3. In some embodiments, the present disclosure pertains to a method for preventing or delaying the onset of a PNPLA3-related disorder in a mammal in need thereof, the method comprising administering to the mammal a therapeutically effective amount of a nucleic acid-lipid particle comprising a PNPLA3 oligonucleotide which targets PNPLA3. In some embodiments, the oligonucleotide is an antisense oligonucleotide or single-stranded RNAi agent. In some embodiments, the mammal is a human, in some embodiments, the mammal is afflicted with and/or suffering from a PNPLA3-related disorder. In some embodiments, the mammal is afflicted with and/or suffering from a PNPLA3-related disorder selected from: liver disease, fatty liver, steatosis, steatohepatitis, hepatitis, and nonalcoholic fatty liver disease.

[1498] In some embodiments, the present disclosure pertains to a method of inhibiting PNPLA3 expression in a cell, the method comprising: (a) contacting the cell with a PNPLA3 oligonucleotide which targets PNPLA3; and (b) maintaining the cell produced in step (a) for a time sufficient to obtain degradation of the mRNA transcript of an PNPLA3 gene, thereby inhibiting expression of the PNPLA3 gene in the cell. In some embodiments, PNPLA3 expression is inhibited by at least 30%. In some embodiments, the oligonucleotide is an antisense oligonucleotide or single-stranded RNAi agent.

[1499] In some embodiments, the present disclosure pertains to a method of treating a disorder mediated by PNPLA3 expression comprising administering to a human in need of such treatment a therapeutically effective amount of a PNPLA3 oligonucleotide which targets PNPLA3. In some embodiments, the oligonucleotide is an antisense oligonucleotide or single-stranded RNAi agent.

[1500] In some embodiments, the present disclosure pertains to a compound comprising a PNPLA3 oligonucleotide which targets PNPLA3 for use in a subject to treat a PNPLA3-related disorder. In some embodiments, the oligonucleotide is an antisense oligonucleotide or single-stranded RNAi agent in some embodiments, a PNPLA3-related disorder is selected from: liver disease, fatty liver, steatosis, steatohepatitis, hepatitis, or nonalcoholic fatty liver disease.

[1501] In some embodiments, a subject is administered a second agent (e.g., an additional therapeutic agent). In some embodiments, the second agent is a PNPLA3 oligonucleotide. In some embodiments, the oligonucleotide targets PNPLA3, in some embodiments, the oligonucleotide is an antisense oligonucleotide or single-stranded RNAi agent.

[1502] The oligonucleotides of the present disclosure can be administered alone or in combination with one or more additional therapeutic agents. By “administered in combination” or “combination therapy” it is meant that the oligonucleotide of the present disclosure and one or more additional therapeutic agents are administered concurrently to the mammal being treated. When administered in combination each component may be administered at the same time or sequentially in any order at different points in time. Thus, each component may be administered separately but sufficiently closely in time so as to provide the desired therapeutic effect. Thus, the compositions and methods of prevention and treatment described herein include use of combination agents.

[1503] The combination agents are administered to a mammal in a therapeutically effective amount. By “therapeutically effective amount” it is meant an amount of a PNPLA3 oligonucleotide of the present disclosure that, when administered alone or in combination with an additional therapeutic agent to a mammal, is effective to treat the desired disease/condition (e.g., obesity, diabetes, and cardiovascular conditions).

[1504] Accordingly, oligonucleotides of the present disclosure may be co-administered with agents for the treatment of non-alcoholic steatohepatitis (NASH) and/or non-alcoholic fatty liver disease (NAFLD) (i.e., anti-NASH and anti-NAFLD agents), such as Orlistat, TZDs and other insulin sensitizing agents, FGF21 analogs, Metformin, Omega-3-acid ethyl esters (e.g. Lovaza), Fibrates, HMG CoA-reductase Inhibitors, Ezitimbe, Probucol, Ursodeoxycholic acid, TGR5 agonists, FXR agonists, Vitamin E, Betaine, Pentoxifylline, CB1 antagonists, Carnitine, N-acetylcysteine, Reduced glutathione, lorcaserin, the combination of naltrexone with buproprion, SGLT2 Inhibitors, Phentermine, Topiramate, Incretin (GIP and GIP) analogs and Angiotensin-receptor blockers. Preferred agents for the treatment of non-alcoholic steatohepatitis (NASH) and/or non-alcoholic fatty liver disease (NAFLD) (i.e., anti-NASH and anti-NAFLD agents) are an acetyl-CoA carboxylase (ACC) inhibitor, a ketohexokinase (KHK) inhibitor, a GLP-1 receptor agonist, an FXR agonist, a CB1 antagonist, an ASK1 inhibitor, an inhibitor of CCR2 and/or CCR5, a PNPLA3 inhibitor, a DGAT1 inhibitor, a DGAT2 inhibitor, an FGF21 analog, an FGF19 analog, an SGLT2 inhibitor, a PPAR agonist, an AMPK activator, an SCD1 inhibitor or an MPO inhibitor. A commonly assigned patent application PCT/IB2017/057.577 filed 12/01/2017. is directed to GLP-1 receptor agonists. Most preferred are a FXR agonist, an apoptosis signal-regulating kinase 1 (ASK1) inhibitor, a PPAR agonist, a GLP-1 receptor agonist, a SGLT inhibitor, a an ACC inhibitor and a KHK inhibitor.

[1505] Further, oligonucleotides of the present disclosure may be co-administered with anti-diabetic agents include (e.g. insulins, metaformin, DPP1V inhibitors (e.g., sitagliptin), GLP-1 receptor agonists, analogues and mimetics, SGLT1 and SGLT2 inhibitors (e.g., ertugliflozin)). Preferred agents are metaformin, sitagliptin and ertugliflozin. Suitable anti-diabetic agents include an acetyl-CoA carboxylase-(ACC) inhibitor such as those described in WO2009144554, WO2003072197, WO2009144555 and WO2008065508, a diacylglycerol O-acyltransferase 1 (DGAT-1) inhibitor, such as those described in WO09016462 or WO2010086820, AZD7687 or LCQ908, a diacylglycerol O-acyltransferase 2 (DGAT 2) inhibitor, such as those described in WO2015/140658, monoacylglycerol O-acyltransferase inhibitors, a phosphodiesterase (PDE)-10 inhibitor, an AMPK activator, a sulfonylurea (e.g., acetohexamide, chlorpropamide, diabinese, glibenclamide, glipizide, glyburide, glimepiride, gliclazide, glipentide, gliquidone, glisolamide, tolazamide, and tolbutamide), a meglitinide, an α-amylase inhibitor. (e.g., tendamistat, trestatin and AL-3688), an α-glucosidehydrolase inhibitor (e.g., acarbose), an α-glucosidase inhibitor (e.g., adiposine, camiglibose, emiglitate, miglitol, voglibose, pradimicin-Q, and salbostatin), a PPARγ agonist (e.g., balaglitazone, ciglitazone, darglitazone, englitazone, isaglitazone, pioglitazone and rosiglitazone), a PPAR α/γ agonist (e.g., CLX-0940, GW-1536, GW-1929, GW-2433, KRP-297, L-79(449, LR-90, MK-0767 and SB-219994), a biguanide (e.g., metformin), a glucagon-like peptide 1 (GLP-1) receptor agonist (e.g., exendin-3 and exendin-4), liraglutide, albiglutide, exenatide (Byetta®)), albiglutide, lixisenatide, dulaglutide, semaglutide, NN-9924, TTP-054, TTP-273, a protein tyrosine phosphatase-1B (PTP-1B) inhibitor (e.g., trodusquemine, hyrtiosal extract, and compounds disclosed by Zhang, S., et al., Drug Discovery Today, 12 (9/10), 373-381 (2007)), SIRT-1 activator (e.g., resveratrol, GSK2245840 or GSK184072), a dipeptidyl peptidase IV (DPP-TV) inhibitor (e.g., those in WO2005116014, sitagliptin, vildagliptin, alogliptin, dutogliptin, linagliptin and saxagliptin), an insulin secretagogue, a fatty acid oxidation inhibitor, an A2 antagonist, a c-jun amino-terminal kinase (JNK) inhibitor, glucokinase activators (GKa) such as those described in WO2010103437, WO2010103438, WO2010013161, WO2007122482, TTP-399, TTP-355, TTP-547, AZD1656, ARRY403, MK-0.599, TAK-329, AZD5658 or GKM-001, insulin, an insulin mimetic, a glycogen phosphorylase inhibitor (e.g. GSK1362885), a VPAC2 receptor agonist, SGLT2 inhibitors, such as those described in E. C. Chao et al. Nature Reviews Drug Discovery 9, 551-559 (July 2010) including dapagliflozin, canagliflozin, empagliflozin, tofogliflozin (CSG452), Ertugliflozin, ASP-1941, THR1474, TS-071, ISIS388626 and LX4211 as well as those in WO2010023594, a glucagon receptor modulator such as those described in Demong, D. E. et al. Annual Reports in Medicinal Chemistry 2008, 43, 119-137, GPR119 modulators, particularly agonists, such as those described in WO2010140092, WO2010128425, WO2010128414, WO2010106457, Jones, R. M. et al, in Medicinal Chemistry 2009, 44, 149-170 (e.g. MBX-2982, GSK1292263, APD597 and PSN821), FGF21 derivatives or analogs such as those described in Kharitonenkov, A. et al. et al., Current Opinion in Investigational Drugs 2009, 10(4)₃₅₉-364, TGR5 (also termed GPBAR1) receptor modulators, particularly agonists, such as those described in Zhong, M., Current Topics in Medicinal Chemistry, 2010, 10(4), 386-3% and INT777, GPR40 agonists, such as those described in Medina, J. C., Annual Reports in Medicinal Chemistry, 2008, 43, 75-85, including but not limited to TAK-875, GPR120 modulators, particularly agonists, high affinity nicotinic acid receptor (HM74A) activators, and SGLT1 inhibitors, such as GSK1614235. A further representative listing of anti-diabetic agents that can be combined with the oligonucleotides of the present disclosure can be found, for example, at page 28, line 35 through page 30, line 19 of WO2011005611. Preferred anti-diabetic agents are metformin and DPP-IV inhibitors (e.g., sitagliptin, vildagliptin, alogliptin, dutogliptin, linagliptin and saxagliptin). Other antidiabetic agents could include inhibitors or modulators of carnitine palmitoyl transferase enzymes, inhibitors of fructose 1,6-diphosphatase, inhibitors of aldose reductase, mineralocorticoid receptor inhibitors, inhibitors of TORC2, inhibitors of CCR2 and/or CCR5, inhibitors of PKC isoforms (e.g. PKC□, PKC□, PKC□), inhibitors of fatty acid synthetase, inhibitors of serine palmitoyl transferase, modulators of GPR81, GPR39, GPR43, GPR41, GPR105, Kv1.3, retinol binding protein 4, glucocorticoid receptor, somatostain receptors (e.g. SSTR 1, SSTR2, SSTR3 and SSTR5), inhibitors or modulators of PDHK2 or PDHK4, inhibitors of MAP4K4, modulators of IL1 family including IL1 beta, modulators of RXRalpha. In addition suitable anti-diabetic agents include mechanisms listed by Carpino, P. A., Goodwin, B. Expert Opin. Ther. Pat, 2010, 20(12), 1627-51.

[1506] Suitable anti-obesity agents include 11□-hydroxy steroid dehydrogenase-1 (11□-HSD type 1) inhibitors, stearoyl-CoA desaturase-1 (SCD-1) inhibitor, MCR-4 agonists, cholecystokinin-A (CCK-A) agonists, monoamine reuptake inhibitors (such as sibutramine), sympathomimetic agents, 1113 adrenergic agonists, dopamine agonists (such as bromocriptine), melanocyte-stimulating hormone analogs, 5HT2c agonists, melanin concentrating hormone antagonists, leptin (the OB protein), leptin analogs, leptin agonists, galanin antagonists, lipase inhibitors (such as tetrahydrolipstatin, i.e. orlistat), anorectic agents (such as a bombesin agonist), neuropeptide-Y antagonists (e.g., NPY Y5 antagonists), PYY3-36 (including analogs thereof), thyromimetic agents, dehydroepiandrosterone or an analog thereof, glucocorticoid agonists or antagonists, orexin antagonists, glucagon-like peptide-1 agonists, ciliary neurotrophic factors (such as Axokine™ available from Regeneron Pharmaceuticals, Inc., Tarry town, NY and Procter & Gamble Company, Cincinnati, OH), human agouti-related protein (AGRP) inhibitors, ghrelin antagonists, histamine 3 antagonists or inverse agonists, neuromedin U agonists, MTP/ApoB inhibitors (e.g., gut-selective MTP inhibitors, such as dirlotapide), opioid antagonist, orexin antagonist, the combination of naltrexone with buproprion and the like.

[1507] Preferred anti-obesity agents for use in the combination aspects of the present disclosure include gut-selective MTP inhibitors (e.g., dirlotapide, mitratapide and implitapide, R56918 (CAS No. 403987) and CAS No. 913541-47-6), CCKa agonists (e.g., N-benyl-2-[4-(1H-indol-3-ylmethyl)-5-oxo-1-phenyl-4,5-dihydro-2,3,6,10b-tetraaza benzo[e]azulen-6-yl]-N-isopropyl-acetamide described in PCT Publication No. WO 2005/116034 or US Publication No. 2005-0267100 A1), 5HT2c agonists (e.g., lorcaserin), MCR4 agonist (e.g., compounds described in U.S. Pat. No. 6,818,658), lipase inhibitor (e.g., Cetilistat), PYY3-36 (as used herein “PYY3-36” includes analogs, such as peglated PYY3-36 e.g., those described in US Publication 2006/0178501), opioid antagonists (e.g., naltrexone), the combination of naltrexone with buproprion, oleoyl-estrone (CAS No. 180003-17-2), obinepitide (TM30338), pramlintide (Symlin®) tesofensine (N52330), leptin, liraglutide, bromocriptine, orlistat, exenatide (Byetta®), AOD-9604 (CAS No. 221231-10-3), phentermine and topiramate (trade name: Qsymia), and sibutramine. Preferably, oligonucleotides of the present disclosure and combination therapies are administered in conjunction with exercise and a sensible diet.

[1508] Those skilled in the art will recognize that oligonucleotides of the present disclosure may also be used in conjunction with cardiovascular or cerebrovascular treatments as described in the paragraphs below. Oligonucleotides of the present disclosure may also be used with cardiovascular therapies including PCI, stenting, drug eluting scents, stem cell therapy and medical devices such as implanted pacemakers, defibrillators, or cardiac resynchronization therapy.

[1509] The oligonucleotides of the present disclosure may be used in combination with cholesterol modulating agents (including cholesterol lowering agents) such as a lipase inhibitor, an HMG-CoA reductase inhibitor, an HMG-CoA synthase inhibitor, an HMG-CoA reductase gene expression inhibitor, an HMG-CoA synthase gene expression inhibitor, an MTP/Apo B secretion inhibitor, a CETP inhibitor, a bile acid absorption inhibitor, a cholesterol absorption inhibitor, a cholesterol synthesis inhibitor, a squalene synthetase inhibitor, a squalene epoxidase inhibitor, a squalene cyclase inhibitor, a combined squalene epoxidase/squalene cyclase inhibitor, a fibrate, niacin, an ion-exchange resin, an antioxidant, an ACAT inhibitor or a bile acid sequestrant or an agent such as mipomersen.

[1510] Examples of suitable cholesterol/lipid lowering agents and lipid profile therapies include: HMG-CoA reductase inhibitors (e.g., pravastatin, lovastatin, atorvastatin, simvastatin, fluvastatin, NK-104 (a.k.a. itavastatin, or nisvastatin or nisvastatin) and ZD-4522 (a.k.a. rosuvastatin, or atavastatin or visastatin); squalene synthetase inhibitors; fibrates; bile acid sequestrants (such as questran); ACAT inhibitors; MTP inhibitors; lipooxygenase inhibitors; choesterol absorption inhibitois; and cholesteryl ester transfer protein inhibitors. Other atherosclerotic agents include PCSK9 modulators.

[1511] Administration of a PNPLA3 Oligonucleotide or a Single-Stranded RNAi Agent

[1512] In some embodiments, provided oligonucleotides are capable of directing a decrease in the expression and/or level of a target gene or its gene product. In some embodiments, provided oligonucleotides are capable of directing a decrease in the expression and/or level of a target gene or its gene product via RNA interference. In some embodiments, provided oligonucleotides are capable of directing a decrease in the expression and/or level of a target gene or its gene product via a biochemical mechanism which does not involve RNA interference or RISC (including, but not limited to, RNaseH-mediated knockdown or steric hindrance of gene expression). In some embodiments, provided oligonucleotides are capable of directing a decrease in the expression and/or level of a target gene or its gene product via RNA interference and/or RNaseH-mediated knockdown. In some embodiments, provided oligonucleotides are capable of directing a decrease in the expression and/or level of a target gene or its gene product by sterically blocking translation after annealing to a target gene mRNA, and/or by altering or interfering with mRNA splicing and/or exon inclusion or exclusion. In some embodiments, provided oligonucleotides are administered with any vehicle, in any dosing regiment, and in any manner described herein or known in the art.

[1513] In some embodiments, a provided oligonucleotide composition is administered at a dose and/or frequency lower than that of an otherwise comparable reference oligonucleotide composition with comparable effect in improving the knockdown of a target transcript. In some embodiments, a stereocontrolled oligonucleotide composition is administered at a dose and/or frequency lower than that of an otherwise comparable stereorandom reference oligonucleotide composition with comparable effect in improving the knockdown of the target transcript.

[1514] In some embodiments, the present disclosure recognizes that properties, e.g., improved single-stranded RNA interference activity, etc. of oligonucleotides and compositions thereof can be optimized by chemical modifications and/or stereochemistry. In some embodiments, the present disclosure provides methods for optimizing oligonucleotide properties through chemical modifications and stereochemistry.

[1515] By controlling of chemical modifications and/or stereochemistry, the present disclosure provides improved oligonucleotide compositions and methods. In some embodiments, provided oligonucleotides capable of directing single-stranded RNA interference comprise chemical modifications. In some embodiments, provided oligonucleotides capable of directing single-stranded RNA interference comprise base modifications, sugar modifications, internucleotidic linkage modifications, or any combinations thereof. In some embodiments, provided oligonucleotides capable of directing single-stranded RNA interference comprise base modifications. In some embodiments, provided oligonucleotides capable of directing single-stranded RNA interference comprise sugar modifications. 1n some embodiments, provided oligonucleotides comprises 2′-modifications on the sugar moieties. In some embodiments, provided oligonucleotides comprises one or more modified internucleotidic linkages and one or more natural phosphate linkages. A natural phosphate linkage can be incorporated into various locations of a PNPLA3 oligonucleotide. In some embodiments, a natural phosphate linkage is incorporated into the 5′-end region. In some embodiments, a natural phosphate linkage is incorporated into the middle of a PNPLA3 oligonucleotide. In some embodiments, the present disclosure provides a method comprising administering a composition comprising a first plurality of oligonucleotides, which composition displays improved delivery as compared with a reference composition comprising a plurality of oligonucleotides, each of which also has the common base sequence but which differs structurally from the oligonucleotides of the first plurality in that:
[1516] individual oligonucleotides within the reference plurality differ from one another in stereochemical structure; and/or
[1517] at least some oligonucleotides within the reference plurality have a structure different from a structure represented by the plurality of oligonucleotides of the composition.

[1518] In some embodiments, the present disclosure provides a method of administering a PNPLA3 oligonucleotide composition comprising a first plurality of oligonucleotides capable of directing single-stranded RNA interference and having a common nucleotide sequence, the improvement that comprises:

[1519] administering a PNPLA3 oligonucleotide comprising a first plurality of oligonucleotides that is characterized by improved delivery relative to a reference oligonucleotide composition of the same common nucleotide sequence.

[1520] In some embodiments, provided oligonucleotides, compositions and methods provide improved systemic delivery. In some embodiments, provided oligonucleotides, compositions and methods provide improved cytoplasmatic delivery. In some embodiments, improved delivery is to a population of cells. In some embodiments, improved delivery is to a tissue. In some embodiments, improved delivery is to an organ. In some embodiments, improved delivery is to an organism. Example structural elements (e.g., chemical modifications, stereochemistry, combinations thereof, etc.), oligonucleotides, compositions and methods that provide improved delivery are extensively described in this disclosure.

[1521] In some embodiments, the present disclosure provides a method of identifying and/or characterizing a PNPLA3 oligonucleotide composition, the method comprising steps of:
[1522] providing at least one composition comprising a first plurality of oligonucleotides; and
[1523] assessing delivery relative to a reference composition.

[1524] In some embodiments, the present disclosure provides a method of identifying and/or characterizing a PNPLA3 oligonucleotide composition, the method comprising steps of:
[1525] providing at least one composition comprising a first plurality of oligonucleotides; and
[1526] assessing cellular uptake relative to a reference composition.

[1527] In some embodiments, properties of a provided oligonucleotide compositions are compared to a reference oligonucleotide composition. In some embodiments, a reference oligonucleotide composition comprises a reference plurality of oligonucleotides.

[1528] In some embodiments, a reference oligonucleotide composition is a stereorandom oligonucleotide composition. In some embodiments, a reference oligonucleotide composition is a stereorandom composition of oligonucleotides of which all internucleotidic linkages are phosphorothioate. In some embodiments, a reference oligonucleotide composition is a DNA oligonucleotide composition with all phosphate linkages.

[1529] In some embodiments, a reference composition is a composition of oligonucleotides having the same base sequence and the same chemical modifications. In some embodiments, a reference composition is a composition of oligonucleotides having the same base sequence and the same patter of chemical modifications. In some embodiments, a reference composition is a chirally un-controlled (or stereorandom) composition of oligonucleotides having the same base sequence and chemical modifications.

[1530] In some embodiments, a reference composition is a composition of oligonucleotides having the same base sequence but different chemical modifications. In some embodiments, a reference composition is a composition of oligonucleotides having the same base sequence, base modifications, internucleotidic linkage modifications but different sugar modifications. In some embodiments, a reference composition has fewer 2′-modified sugar modifications. In some embodiments, a reference composition is a composition of oligonucleotides having the same base sequence, base modifications, sugar modifications but different internucleotidic linkage modifications. In some embodiments, a reference composition has more internucleotidic linkage modifications. In some embodiments, a reference composition has fewer natural phosphate linkages. In some embodiments, a reference composition comprising oligonucleotides having no natural phosphate linkages.

[1531] In some embodiments, a reference composition is a composition comprising a reference plurality of oligonucleotides wherein individual oligonucleotides within the reference plurality differ from one another in stereochemical structure. In some embodiments, a reference composition is a composition comprising a reference plurality of oligonucleotides, wherein at least some oligonucleotides within the reference plurality have a structure different from a structure represented by a plurality of oligonucleotides of a composition compared to the reference composition.

[1532] In some embodiments, a reference oligonucleotide composition comprises a reference plurality of oligonucleotides capable of directing single-stranded RNA interference and having the same common nucleotide sequence but lacking at least one of the one or more modified sugar moieties in oligonucleotides of the oligonucleotide composition compared to the reference composition. In some embodiments, a reference oligonucleotide composition comprises a reference plurality of oligonucleotides capable of directing single-stranded RNA interference and having the same common nucleotide sequence but have no modified sugar moieties. In some embodiments, a reference oligonucleotide composition comprises a reference plurality of oligonucleotide capable of directing single-stranded RNA interference and having the same common nucleotide sequence but do not comprise natural phosphate linkages. In some embodiments, a reference composition is a PNPLA3 oligonucleotide or a single-stranded RNAi agent of oligonucleotides having the same chemical modification patterns. In some embodiments, a reference composition is a PNPLA3 oligonucleotide or a single-stranded RNAi agent of another stereoisomer.

[1533] In some embodiments, a reference oligonucleotide composition of a provided oligonucleotide composition is a comparable composition absence of the lipids in the provided composition. In some embodiments, a reference oligonucleotide composition is a stereorandom oligonucleotide composition. In some embodiments, a reference oligonucleotide composition is a stereorandom composition of oligonucleotides of which all internucleotidic linkages are phosphorothioate. In some embodiments, a reference oligonucleotide composition is a DNA oligonucleotide composition with all phosphate linkages. In some embodiments, a reference composition is a composition of oligonucleotide having the same base sequence and the same chemical modifications. In some embodiments, a reference composition is a composition of oligonucleotide having the same base sequence and the same pattern of chemical modifications. In some embodiments, a reference composition is a chirally un-controlled (or stereorandom) composition of oligonucleotides having the same base sequence and chemical modifications. In some embodiments, a reference composition is a composition of oligonucleotides having the same base sequence but different chemical modifications, in some embodiments, a reference composition is a composition of oligonucleotides having the same base sequence, base modifications, internucleotidic linkage modifications but different sugar modifications, in some embodiments, a reference composition has fewer 2′-modified sugar modifications, in some embodiments, a reference composition is a composition of oligonucleotides having the same base sequence, base modifications, sugar modifications but different internucleotidic linkage modifications. In some embodiments, a reference composition has more internucleotidic linkage modifications, in some embodiments, a reference composition has fewer natural phosphate linkages. In some embodiments, a reference composition comprising oligonucleotides having no natural phosphate linkages. In some embodiments, a reference composition is a composition comprising a reference plurality of oligonucleotides wherein individual oligonucleotides within the reference plurality differ from one another in stereochemical structure. In some embodiments, a reference composition is a composition comprising a reference plurality of oligonucleotides, wherein at least some oligonucleotides within the reference plurality have a structure different from a structure represented by a plurality of oligonucleotides of a composition compared to the reference composition. In some embodiments, a reference oligonucleotide composition comprises a reference plurality of oligonucleotides capable of directing single-stranded RNA interference and having the same common nucleotide sequence but lacking at least one of the one or more modified sugar moieties in oligonucleotides of the oligonucleotide composition compared to the reference composition. In some embodiments, a reference oligonucleotide composition comprises a reference plurality of oligonucleotides capable of directing single-stranded RNA interference and having the same common nucleotide sequence but have no modified sugar moieties. In some embodiments, a reference oligonucleotide composition comprises a reference plurality of oligonucleotides capable of directing single-stranded RNA interference and having the same common nucleotide sequence but do not comprise natural phosphate linkages. In some embodiments, a reference composition is a PNPLA3 oligonucleotide or a single-stranded RNAi agent of oligonucleotides having the same chemical modification patterns. In some embodiments, a reference composition is a PNPLA3 oligonucleotide or a single-stranded RNAi agent of another stereoisomer.

[1534] In some embodiments, oligonucleotides of the first plurality comprise one or more structural elements (e.g., modifications, stereochemistry, patterns, etc.) that oligonucleotides of the reference plurality do not all have. Such structural elements can be any one described in this disclosure.

[1535] In some embodiments, oligonucleotides of the first plurality comprise more phosphorothioate linkages the PNPLA3 oligonucleotides of the reference composition. In some embodiments, oligonucleotides of the first plurality comprise more phosphorothioate linkages than PNPLA3 oligonucleotides of the reference composition at the 5′-end region. In some embodiments, oligonucleotides of the first plurality comprise more phosphorothioate linkages than PNPLA3 oligonucleotides of the reference composition at the 3′-end region. In some embodiments, oligonucleotides of the first plurality comprise more Sp chiral internucleotidic linkages than PNPLA3 oligonucleotides of the reference composition. In some embodiments, oligonucleotides of the first plurality comprise more Sp phosphorothioate linkages than PNPLA3 oligonucleotides of the reference composition. In some embodiments, oligonucleotides of the first plurality comprise more Sp phosphorothioate linkages than PNPLA3 oligonucleotides of the reference composition at the 5′-end region. In some embodiments, oligonucleotides of the first plurality comprise more Sp phosphorothioate linkages than PNPLA3 oligonucleotides of the reference composition at the 3′-end region. In some embodiments, oligonucleotides of the first plurality comprise more modified bases than PNPLA3 oligonucleotides of the reference composition. In some embodiments, oligonucleotides of the first plurality comprise more methylated bases than PNPLA3 oligonucleotides of the reference composition. In some embodiments, oligonucleotides of the first plurality comprise more methylated bases ilia PNPLA3 oligonucleotides of the reference composition at the 5′-end region. In some embodiments, oligonucleotides of the first plurality comprise more methylated bases than PNPLA3 oligonucleotides of the reference composition at the 3′-end region. In some embodiments, oligonucleotides of the first plurality comprise fewer 2′-MOE modifications than PNPLA3 oligonucleotides of the reference composition. In some embodiments, oligonucleotides of the first plurality comprise fewer 2′-MOE modifications than PNPLA3 oligonucleotides of the reference composition. In some embodiments, oligonucleotides of the first plurality comprise fewer 2′-MOE modifications than PNPLA3 oligonucleotides of the reference composition at the 5′-end region. In some embodiments, oligonucleotides of the first plurality comprise fewer 2′-MOE modifications than PNPLA3 oligonucleotides of the reference composition at the 3′-end region. In some embodiments, individual oligonucleotides within the reference plurality differ from one another in stereochemical structure. In some embodiments, at least some oligonucleotides within the reference plurality have a structure different from a structure represented by the plurality of oligonucleotides of the composition, in some embodiments, the reference composition is a substantially racemic preparation of oligonucleotides that share the base sequence. In some embodiments, the reference composition is a PNPLA3 oligonucleotide or a single-stranded RNAi aunt of another oligonucleotide type. In some embodiments, oligonucleotides of the reference composition comprise more phosphorothioate linkages. In some embodiments, oligonucleotides of the reference composition comprise only phosphorothioate linkages. In some embodiments, oligonucleotides of the reference composition comprise fewer modified sugar moieties. In some embodiments, oligonucleotides of the reference composition comprise fewer modified sugar moieties, wherein the modification is 2′-OR¹.

[1536] In some embodiments, oligonucleotides of the reference composition comprise more modified sugar moieties. In some embodiments, oligonucleotides of the reference composition comprise more modified sugar moieties, the modification is 2′-OR¹. In some embodiments, oligonucleotides of the reference composition comprise fewer phosphorothioate linkages. In some embodiments, oligonucleotides of the reference composition comprise fewer methylated bases. In some embodiments, oligonucleotides of the reference composition comprise more 2′-MOE modifications. In some embodiments, oligonucleotides of the reference composition comprise fewer natural phosphate linkages. In some embodiments, oligonucleotides of the reference composition comprise fewer natural phosphate linkages at the 5′- and/or 3′-end region In some embodiments, oligonucleotides of a provided composition comprise fewer 2′-MOE modifications than PNPLA3 oligonucleotides of the reference composition. In some embodiments, oligonucleotides of a provided composition comprise fewer 2′-MOE modifications than PNPLA3 oligonucleotides of the reference composition. In some embodiments, oligonucleotides of a provided composition comprise fewer 2′-MOE modifications than PNPLA3 oligonucleotides of the reference composition at the 5′-end region, in some embodiments, oligonucleotides of a provided composition comprise fewer 2′-MOE modifications than PNPLA3 oligonucleotides of the reference composition at the 3′-end region. In some embodiments, individual oligonucleotides within the reference plurality differ from one another in stereochemical structure. In some embodiments, at least some oligonucleotides within the reference plurality have a structure different from a structure represented by the plurality of oligonucleotides of the composition, in some embodiments, the reference composition is a substantially racemic preparation of oligonucleotides that share the base sequence. In some embodiments, the reference composition is a PNPLA3 oligonucleotide or a single-stranded RNAi agent of another oligonucleotide type. In some embodiments, oligonucleotides of the reference composition comprise more phosphorothioate linkages, in some embodiments, oligonucleotides of the reference composition comprise only phosphorothioate linkages. In some embodiments, oligonucleotides of the reference composition comprise fewer modified sugar moieties. In some embodiments, oligonucleotides of the reference composition comprise fewer modified sugar moieties, wherein the modification is 2′-OR¹. In some embodiments, oligonucleotides of the reference composition comprise more modified sugar moieties. In some embodiments, oligonucleotides of the reference composition comprise more modified sugar moieties, the modification is 2′-OR¹. In some embodiments, oligonucleotides of the reference composition comprise fewer phosphorothioate linkages. In some embodiments, oligonucleotides of the reference composition comprise fewer methylated bases. In some embodiments, oligonucleotides of the reference composition comprise more 2′-MOE modifications, in some embodiments, oligonucleotides of the reference composition comprise fewer natural phosphate linkages. In some embodiments, oligonucleotides of the reference composition comprise fewer natural phosphate linkages at the 5′- and/or 3′-end region. In some embodiments, oligonucleotides of a reference plurality comprise fewer nucleotidic units comprising —F. In some embodiments, oligonucleotides of a reference plurality comprise fewer 2′-F modified sugar moieties, in some embodiments, oligonucleotides of a reference plurality comprise fewer chirally controlled modified internucleotidic linkages.

[1537] In some embodiments, provided chirally controlled oligonucleotide compositions comprises oligonucleotides of one oligonucleotide type, in some embodiments, provided chirally controlled oligonucleotide compositions comprises oligonucleotides of only one oligonucleotide type. In some embodiments, provided chirally controlled oligonucleotide compositions has oligonucleotides of only one oligonucleotide type. In some embodiments, provided chirally controlled oligonucleotide compositions comprises oligonucleotides of two or more oligonucleotide types. In some embodiments, using such compositions, provided methods can target more than one target. In some embodiments, a PNPLA3 oligonucleotide or a single-stranded RNAi agent comprising two or more oligonucleotide types targets two or more targets. In some embodiments, a PNPLA3 oligonucleotide or a single-stranded RNAi agent comprising two or more oligonucleotide types targets two or more mismatches. In some embodiments, a single oligonucleotide type targets two or more targets, e.g., mutations. In some embodiments, a target region of oligonucleotides of one oligonucleotide type comprises two or more “target sites” such as two mutations or SNPs.

[1538] In some embodiments, oligonucleotides in a provided chirally controlled oligonucleotide composition optionally comprise modified bases or sugars, in some embodiments, a provided chirally controlled oligonucleotide composition does not have any modified bases or sugars. In some embodiment, a provided chirally controlled oligonucleotide composition does not have any modified bases, in some embodiments, oligonucleotides in a provided chirally controlled oligonucleotide composition comprise modified bases and sugars, in some embodiments, oligonucleotides in a provided chirally controlled oligonucleotide composition comprise a modified base. In some embodiments, oligonucleotides in a provided chirally controlled oligonucleotide composition comprise a modified sugar. Modified bases and sugars for oligonucleotides are widely known in the art, including but not limited in those described in the present disclosure. In some embodiments, a modified base is 5-mC. In some embodiments, a modified sugar is a 2′-modified sugar. Suitable 2′-modification of oligonucleotide sugars are widely known by a person having ordinary skill in the art, in some embodiments, 2′-modifications include but are not limited to 2′-OR¹, wherein R¹ is not hydrogen. In some embodiments, a 2′-modification is 2′-OR¹, wherein R¹ is optionally substituted C₁₋₆ aliphatic. In some embodiments, a 2′-modification is 2′-MOE, in some embodiments, a modification is 2′-halogen. In some embodiments, a modification is 2′-F. In some embodiments, modified bases or sugars may further enhance activity, stability and/or selectivity of a chirally controlled oligonucleotide composition, whose common pattern of backbone chiral centers provides unexpected activity, stability and/or selectivity.

[1539] In some embodiments, a provided chirally controlled oligonucleotide composition does not have any modified sugars. In some embodiments, a provided chirally controlled oligonucleotide composition does not have any 2′-modified sugars. In some embodiments, the present disclosure surprising found that by using chirally controlled oligonucleotide compositions, modified sugars are not needed for stability, activity, and/or control of cleavage patterns. Furthermore, in some embodiments, the prat disclosure surprisingly found that chirally controlled oligonucleotide compositions of oligonucleotides without modified sugars deliver better properties in terms of stability, activity, turn-over and/or control of cleavage patterns. For example, in some embodiments, it is surprising found that chirally controlled oligonucleotide compositions of oligonucleotides having no modified sugars dissociates much faster from cleavage products and provide significantly increased turn-over than compositions of oligonucleotides with modified sugars.

[1540] As discussed in detail herein, the present disclosure provides, among other things, a chi rally controlled oligonucleotide composition, meaning that the composition contains a plurality of oligonucleotides of at least one type. Each oligonucleotide molecule of a particular “type” is comprised of preselected (e.g., predetermined) structural elements with respect to: (1) base sequence; (2) pattern of backbone linkages; (3) pattern of backbone chiral centers; and (4) pattern of backbone P-modification moieties. In some embodiments, provided oligonucleotide compositions contain oligonucleotides that are prepared in a single synthesis process. In some embodiments, provided compositions contain oligonucleotides having more than one chiral configuration within a single oligonucleotide molecule (e.g., where different residues along the oligonucleotide have different stereochemistry); in some such embodiments, such oligonucleotides may be obtained in a single synthesis process, without the need for secondary conjugation steps to generate individual oligonucleotide molecules with more than one chiral configuration.

[1541] Oligonucleotide compositions as provided herein can be used as single-stranded RNAi agents. In addition, oligonucleotide compositions as provided herein can be used as reagents for research and/or diagnostic purposes. One of ordinary skill in the art will readily recognize that the present disclosure disclosure herein is not limited to particular use but is applicable to any situations where the use of synthetic oligonucleotides is desirable. Among other things, provided compositions are useful in a variety of therapeutic, diagnostic, agricultural, and/or research applications.

[1542] In some embodiments, provided oligonucleotide compositions comprise oligonucleotides and/or residues thereof that include one or more structural modifications as described in detail herein. In some embodiments, provided oligonucleotide compositions comprise oligonucleotides that contain one or more modified nucleotides. In some embodiments, provided oligonucleotide compositions comprise oligonucleotides that contain one or more artificial nucleic acids or residues, including but not limited to: peptide nucleic acids (PNA), Morpholino and locked nucleic acids (LNA), glycon nucleic acids (GNA), threose nucleic acids (TNA), Xeno nucleic acids (XNA), manitol nucleic acid (MNA), anitol nucleic acid (ANA), and F-HNA, and any combination thereof. In some embodiments, a provided oligonucleotide comprises a Morpholino as described in Braasch et al. 2002 Biochem 41: 4503-4510, or U.S. Pat. Nos. 5,698,685; 5,166,315; 5,185,444; or 5,034,506. In some embodiments, a provided oligonucleotide comprises a F-HNA as described in U.S. Pat. Nos. 8,088,904; 8,440,803; or 8,796,437; or in WO 2017/011276. Various modified nucleotides, including modified sugars are described in, for example, WO 2016/154096 and WO 2016/141236.

[1543] In any of the embodiments, the disclosure is useful for oligonucleotide-based modulation of gene expression, immune response, etc. Accordingly, stereo-defined, oligonucleotide compositions of the disclosure, which contain oligonucleotides of predetermined type (i.e., which are chirally controlled, and optionally chirally pure), can be used in lieu of conventional stereo-random or chirally impure counterparts. In some embodiments, provided compositions show enhanced intended effects and/or reduced unwanted side effects. Certain embodiments of biological and clinical/therapeutic applications of the disclosure are discussed explicitly below.

[1544] Various dosing regimens can be utilized to administer provided chirally controlled oligonucleotide compositions. In some embodiments, multiple unit doses are administered, separated by periods of time, in some embodiments, a given composition has a recommended dosing regimen, which may involve one or more doses. In some embodiments, a dosing regimen comprises a plurality of doses each of which are separated from one another by a time period of the same length; in some embodiments, a dosing regimen comprises a plurality of doses and at least two different time periods separating individual doses, in some embodiments, all doses within a dosing regimen are of the same unit dose amount, in some embodiments, different doses within a dosing regimen are of different amounts. In some embodiments, a dosing regimen comprises a first dose in a first dose amount, followed by one or more additional doses in a second dose amount different from the first dose amount. In some embodiments, a dosing regimen comprises a first dose in a first dose amount, followed by one or more additional doses in a second (or subsequent) dose amount that is same as or different from the first dose (or another prior dose) amount. In some embodiments, a dosing regimen comprises administering at least one unit dose for at least one day. In some embodiments, a dosing regimen comprises administering more than one dose over a time period of at least one day, and sometimes more than one day. In some embodiments, a dosing regimen comprises administering multiple doses over a time period of at least week. In some embodiments, the time period is at least 2, 3, 4, 5, 6, 7, 8, 9, 10, 11, 12, 13, 14, 15, 16, 17, 18, 19, 20, 21, 22, 23 24, 25, 26, 27, 28, 29, 30, 31, 32, 33, 34, 35, 36, 37, 38, 39, 40 or more (e.g., about 45, 50, 55, 60, 65, 70, 75, 80, 85, 90, 95, 100 or more) weeks, in some embodiments, a dosing regimen comprises administering one dose per week for more than one week. In some embodiments, a dosing regimen comprises administering one dose per week for 2, 3, 4, 5, 6, 7, 8, 9, 10, 11, 12, 13,14, 15, 16,17, 18, 0.19, 20, 21, 22, 23 24, 25, 26, 27, 28, 29, 30, 31, 32, 33, 34, 35, 36, 37, 38, 39, 40 or more (e.g., about 45, 50, 55, 60, 65, 70, 75, 80, 85, 90, 95, 100 or more) weeks, in some embodiments, a dosing regimen comprises administering one dose every two weeks for more than two week period. In some embodiments, a dosing regimen comprises administering one dose every two weeks over a time period of 2, 3, 4, 5, 6, 7, 8, 9, 10, 11, 12, 13, 14, 15, 16,17, 18, 19, 20, 21, 22, 23 24, 25, 26, 27, 28, 29, 30, 31, 32, 33, 34, 35, 36, 37, 38, 39, 40 or more (e.g., about 45, 50, 55, 60, 65, 70, 75, 80, 85, 90, 95, 100 or more) weeks. In some embodiments, a dosing regimen comprises administering one dose per month for one month. In some embodiments, a dosing regimen comprises administering one dose per month for more than one month. In some embodiments, a dosing regimen comprises administering one dose per month for 2, 3, 4, 5, 6, 7, 8, 9, 10, 11, 12, or more months. In some embodiments, a dosing regimen comprises administering one dose per week for about 10 weeks, in some embodiments, a dosing regimen comprises administering one dose per week for about 20 weeks. In some embodiments, a dosing regimen comprises administering one dose per week for about 30 weeks. In some embodiments, a dosing regimen comprises administering one dose per week for 26 weeks. In some embodiments, a PNPLA3 oligonucleotide or a single-stranded RNAi agent is administered according to a dosing regimen that differs from that utilized for a chirally uncontrolled (e.g., stereorandom) oligonucleotide composition of the same sequence, and/or of a different chirally controlled oligonucleotide composition of the same sequence. In some embodiments, a PNPLA3 oligonucleotide or a single-stranded RNAi agent is administered according to a dosing regimen that is reduced as compared with that of a chirally uncontrolled (e.g., stereorandom) oligonucleotide composition of the same sequence in that it achieves a lower level of total exposure over a given unit of time, involves one or more lower unit doses, and/or includes a smaller number of doses over a given unit of time. In some embodiments, a PNPLA3 oligonucleotide or a single-stranded RNAi agent is administered according to a dosing regimen that extends for a longer period of time than does that of a chirally uncontrolled (e.g., stereorandom) oligonucleotide composition of the same sequence Without wishing to be limited by theory, Applicant notes that in some embodiments, the shorter dosing regimen, and/or longer time periods between doses, may be due to the improved stability, bioavailability, and/or efficacy of a chirally controlled oligonucleotide composition. In some embodiments, a PNPLA3 oligonucleotide or a single-stranded RNAi agent has a longer dosing regimen compared to the corresponding chirally uncontrolled oligonucleotide composition. In some embodiments, a PNPLA3 oligonucleotide or a single-stranded RNAi agent has a shorter time period between at least two doses compared to the corresponding chirally uncontrolled oligonucleotide composition. Without wishing to be limited by theory, Applicant notes that in some embodiments longer dosing regimen, and/or shorter time periods between doses, may be due to the improved safety of a chirally controlled oligonucleotide composition.

[1545] In some embodiments, with their improved delivery (and other properties), provided compositions can be administered in lower dosages and/or with lower frequency to achieve biological effects, for example, clinical efficacy.

[1546] A single dose can contain various amounts of oligonucleotides. In some embodiments, a single dose can contain various amounts of a type of chirally controlled oligonucleotide, as desired suitable by the application. In some embodiments, a single dose contains about 1, 5, 10, 20, 30, 40, 50, 60, 70, 80, 90, 100, 110, 120, 130, 140, 150, 160, 170, 180, 190, 200, 210, 220, 230, 240, 250, 260, 270, 280, 290, 300 or more (e.g., about 350, 400, 450, 500, 550, 600, 650, 700, 750, 800, 850, 900, 950, 1000 or more) mg of a type of chirally controlled oligonucleotide. In some embodiments, a single dose contains about 1 mg of a type of chirally controlled oligonucleotide. In some embodiments, a single dose contains about 5 mg of a type of chirally controlled oligonucleotide. In some embodiments, a single dose contains about 10 mg of a type of chirally controlled oligonucleotide. In some embodiments, a single dose contains about 15 mg of a type of chirally controlled oligonucleotide. In some embodiments, a single dose contains about 20 mg of a type of chirally controlled oligonucleotide. In some embodiments, a single dose contains about 50 mg of a type of chirally controlled oligonucleotide. In some embodiments, a single dose contains about 100 mg of a type of chirally controlled oligonucleotide. In some embodiments, a single dose contains about 150 mg of a type of chirally controlled oligonucleotide. In some embodiments, a single dose contains about 200 mg of a type of chirally controlled oligonucleotide. In some embodiments, a single dose contains about 250 mg of a type of chirally controlled oligonucleotide. In some embodiments, a single dose contains about 300 mg of a type of chirally controlled oligonucleotide. In some embodiments, a chirally controlled oligonucleotide is administered at a lower amount in a single dose, and/or in total dose, than a chirally uncontrolled oligonucleotide. In some embodiments, a chirally controlled oligonucleotide is administered at a lower amount in a single dose, and/or in total dose, than a chirally uncontrolled oligonucleotide due to improved efficacy. In some embodiments, a chirally controlled oligonucleotide is administered at a higher amount in a single dose, and/or in total dose, than a chirally uncontrolled oligonucleotide. In some embodiments, a chirally controlled oligonucleotide is administered at a higher amount in a single dose, and/or in total dose, than a chirally uncontrolled oligonucleotide due to improved safety.

### Biologically Active Oligonucleotides

[1547] In some embodiments, the present disclosure encompasses oligonucleotides which capable of acting as single-stranded RNAi agents.

[1548] In some embodiments, provided compositions include one or more oligonucleotides fully or partially complementary to strand of: structural genes, genes control and/or termination regions, and/or self-replicating systems such as viral or plasmid DNA. In some embodiments, provided compositions include one or more oligonucleotides that are or act as RNAi agents or other RNA interference reagents (RNAi agents or iRNA agents), shRNA, antisense oligonucleotides, self-cleaving RNAs, ribozymes, fragment thereof and/or variants thereof (such as Peptidyl transferase 23S rRNA, RNase P, Group I and Group II introns, GIR1 branching ribozymes, Leadzyme, Hairpin ribozymes, Hammerhead ribozymes, HDV ribozymes, Mammalian CPEB3 ribozyme, VS ribozymes, glmS ribozymes, CoTC ribozyme, etc.), microRNAs, microRNA mimics, supermirs, aptamers, antimirs, antagomirs, UI adaptors, triplex-forming oligonucleotides, RNA activators, long non-coding RNAs, short non-coding RNAs (e.g., piRNAs), immunomodulatory oligonucleotides (such as immunostimulatory oligonucleotides, immunoinhibitory oligonucleotides), GNA, LNA, ENA, PNA, TNA, morpholinos, G-quadruplex (RNA and DNA), antiviral oligonucleotides, and decoy oligonucleotides.

[1549] In some embodiments, provided compositions include one or more hybrid (e.g., chimeric) oligonucleotides. In the context of the present disclosure, the term “hybrid” broadly refers to mixed structural elements of oligonucleotides. Hybrid oligonucleotides may refer to, for example, (1) a PNPLA3 oligonucleotide molecule having mixed classes of nucleotides, e.g., part DNA and part RNA within the single molecule (e.g., DNA-RNA); (2) complementary pairs of nucleic acids of different classes, such that DNA:RNA base pairing occurs either intramolecularly or intermolecularly; or both; (3) a PNPLA3 oligonucleotide with two or more kinds of the backbone or internucleotide linkages.

[1550] In some embodiments, provided compositions include one or more oligonucleotide that comprises more than one classes of nucleic acid residues within a single molecule. For example, in any of the embodiments described herein, a PNPLA3 oligonucleotide may comprise a DNA portion and an RNA portion. In some embodiments, a PNPLA3 oligonucleotide may comprise a unmodified portion and modified portion.

[1551] Provided oligonucleotide compositions can include oligonucleotides containing any of a variety of modifications, for example as described herein. In some embodiments, particular modifications are selected, for example, in light of intended use. In some embodiments, it is desirable to modify one or both strands of a double-stranded oligonucleotide (or a double-stranded portion of a single-stranded oligonucleotide), in some embodiments, the two strands (or portions) include different modifications. In some embodiments, the two strands include the same modifications. One of skill in the art will appreciate that the degree and type of modifications enabled by methods of the present disclosure allow for numerous permutations of modifications to be made. Examples of such modifications are described herein and are not meant to be limiting.

[1552] The phrase “antisense strand” as used herein, refers to a PNPLA3 oligonucleotide that is substantially or 100% complementary to a target sequence of interest. The phrase “antisense strand” includes the antisense region of both oligonucleotides that are formed from two separate strands, as well as unimolecular oligonucleotides that are capable of forming hairpin or dumbbell type structures. In reference to a double-stranded RNAi agent such as a siRNA, the antisense strand is the strand preferentially incorporated into RISC, and which targets RISC-mediated knockdown of a RNA target. In reference to a double-stranded RNAi agent, the terms “antisense strand” and “guide strand” are used interchangeably herein; and the terms “sense strand” or “passenger strand” are used interchangeably herein in reference to the strand which is not the antisense strand.

[1553] The phrase “sense strand” refers to a PNPLA3 oligonucleotide that has the same nucleoside sequence, in whole or in part, as a target sequence such as a messenger RNA or a sequence of DNA.

[1554] By “target sequence” is meant any nucleic acid sequence whose expression or activity is to be modulated. The target nucleic acid can be DNA or RNA, such as endogenous DNA or RNA, viral DNA or viral RNA, or other RNA encoded by a gene, virus, bacteria, fungus, mammal, or plant. In some embodiments, a target sequence is associated with a disease or disorder. In reference to RNA interference and RNase H-mediated knockdown, a target sequence is generally a RNA target sequence.

[1555] By “specifically hybridizable” and “complementary” is meant that a nucleic acid can form hydrogen bond(s) with another nucleic acid sequence by either traditional Watson-Crick or other non traditional types, in reference to the nucleic molecules of the mum disclosure, the binding free enemy for a nucleic acid molecule with its complementary sequence is sufficient to allow the relevant function of the nucleic acid to proceed, e.g., RNAi activity. Determination of binding free energies for nucleic acid molecules is well known in the art (see, e.g., Turner et al, 1987, CSH Symp. (want. Biol. LIT pp. 123-133; Frier et al., 1986, Proc. Nat. Acad. Sci. USA 83:9373-9377; Turner et al., 1987, J. Am. Chem. Soc. 109:3783-3785)

[1556] A percent complementarity indicates the percentage of contiguous residues in a nucleic acid molecule that can form hydrogen bonds (e.g., Watson-Crick base pairing) with a second nucleic acid sequence (e.g., 5, 6, 7, 8, 9, 10 out of 10 being 50%, 60%, 70%, 80%, 90%, and 100% complementary). “Perfectly complementary” or 100% complementarity means that all the contiguous residues of a nucleic acid sequence will hydrogen bond with the same number of contiguous residues in a second nucleic acid sequence. Less than perfect complementarity refers to the situation in which some, but not all, nucleoside units of two strands can hydrogen bond with each other. “Substantial complementarily” refers to polynucleotide strands exhibiting 90% or greater complementarity, excluding regions of the polynucleotide strands, such as overhangs, that are selected so as to be noncomplementary. Specific binding requires a sufficient degree of complementarity to avoid non-specific binding of the oligomeric compound to non-target sequences under conditions in which specific binding is desired, e.g., under physiological conditions in the case of in vivo assays or therapeutic treatment, or in the case of in vivo assays, under conditions in which the assays are performed. In some embodiments, non-target sequences differ from corresponding target sequences by at least 5 nucleotides.

[1557] When used as therapeutics, a provided oligonucleotide is administered as a pharmaceutical composition. In some embodiments, the pharmaceutical composition comprises a therapeutically effective amount of provided oligonucleotide comprising, or a pharmaceutically acceptable salt thereof, and at least one pharmaceutically acceptable inactive ingredient selected from pharmaceutically acceptable diluents, pharmaceutically acceptable excipients, and pharmaceutically acceptable carriers. In some embodiments, the pharmaceutical composition is formulated for intravenous injection, oral administration, buccal administration, inhalation, nasal administration, topical administration, ophthalmic administration or otic administration. In further embodiments, the pharmaceutical composition is a tablet, a pill, a capsule, a liquid, an inhalant, a nasal spray solution, a suppository, a suspension, a gel, a colloid, a dispersion, a suspension, a solution, an emulsion, an ointment, a lotion, an eye drop or an ear drop.

### Pharmaceutical Compositions

[1558] When used as therapeutics, a provided oligonucleotide or oligonucleotide composition described herein is administered as a pharmaceutical composition. In some embodiments, the pharmaceutical composition comprises a therapeutically effective amount of a provided oligonucleotides, or a pharmaceutically acceptable salt thereof, and at least one pharmaceutically acceptable inactive ingredient selected from pharmaceutically acceptable diluents, pharmaceutically acceptable excipients, and pharmaceutically acceptable carriers, in some embodiments, the pharmaceutical composition is formulated for intravenous injection, oral administration, buccal administration, inhalation, nasal administration, topical administration, ophthalmic administration or otic administration. In some embodiments, the pharmaceutical composition is a tablet, a pill, a capsule, a liquid, an inhalant, a nasal spray solution, a suppository, a suspension, a gel, a colloid, a dispersion, a suspension, a solution, an emulsion, an ointment, a lotion, an eye drop or an ear drop.

[1559] In some embodiments, the present disclosure provides a pharmaceutical composition comprising chirally controlled oligonucleotide, or composition thereof, in admixture with a pharmaceutically acceptable excipient. One of skill in the art will recognize that the pharmaceutical compositions include the pharmaceutically acceptable salts of the chirally controlled oligonucleotide, or composition thereof, described above.

[1560] A variety of supramolecular nanocarriers can be used to deliver nucleic acids. Example nanocarriers include, but are not limited to liposomes, cationic polymer complexes and various polymeric. Complexation of nucleic acids with various polycations is another approach for intracellular delivery; this includes use of PEGlyated polycations, polyethyleneamine (PEI) complexes, cationic block co-polymers, and dendrimers. Several cationic nanocarriers, including PEI and polyamidoamine dendrimers help to release contents from endosomes. Other approaches include use of polymeric nanoparticles, microspheres, liposomes, dendrimers, biodegradable polymers, conjugates, prodrugs, inorganic colloids such as sulfur or iron, antibodies, implants, biodegradable implants, biodegradable microspheres, osmotically controlled implants, lipid nanoparticles, emulsions, oily solutions, aqueous solutions, biodegradable polymers, poly(lactide-coglycolic acid), poly(lactic acid), liquid depot, polymer micelles, quantum dots and lipoplexes. In some embodiments, a PNPLA3 oligonucleotide is conjugated to another molecular.

[1561] Additional nucleic acid delivery strategies are known in addition to the example delivery strategies described herein.

[1562] In therapeutic and/or diagnostic applications, the compounds of the disclosure can be formulated for a variety of modes of administration, including systemic and topical or localized administration. Techniques and formulations generally may be found in Remington, The Science and Practice of Pharmacy, (20th ed. 2000).

[1563] Provided oligonucleotides, and compositions thereof, are effective over a wide dosage range. For example, in the treatment of adult humans, dosages from about 0.01 to about 1000 mg, from about 0.5 to about 100 mg, from about 1 to about 50 mg per day, and from about 5 to about 100 mg per day are examples of dosages that may be used. The exact dosage will depend upon the route of administration, the form in which the compound is administered, the subject to be treated, the body weight of the subject to be treated, and the preference and experience of the attending physician.

[1564] Pharmaceutically acceptable salts are generally well known to those of ordinary skill in the art, and may include, by way of example but not limitation, acetate, benzenesulfonate, besylate, benzoate, bicarbonate, bitartrate, bromide, calcium edetate, carnsylate, carbonate, citrate, edetate, edisylate, estolate, esylate, fumarate, gluceptate, gluconate, glutamate, glycollylarsanilate, hexylresorcinate, hydrabamine, hydrobromide, hydrochloride, hydroxynaphthoate, iodide, isethionate, lactate, lactobionate, malate, maleate, mandelate, mesylate, mucate, napsylate, nitrate, pamoate (embonate), pantothenate, phosphate/diphosphate, polygalacturonate, salicylate, stearate, subacetate, succinate, sulfate, Latinate, tartrate, or teoclate. Other pharmaceutically acceptable salts may be found in, for example, Remington, The Science and Practice of Pharmacy (20th ed. 2000). Preferred pharmaceutically acceptable salts include, for example, acetate, benzoate, bromide, carbonate, citrate, gluconate, hydrobromide, hydrochloride, maleate, mesylate, napsylate, pamoate (embonate), phosphate, salicylate, succinate, sulfate, or tartrate.

[1565] In some embodiments, a provided single-stranded RNAi agent is formulated in a pharmaceutical composition described in U.S. Applications No. 61/774,759; 61/918,175, filed Dec. 19, 2013; 61/918,927; 61/918,182; 61/918941; 62/025224; 62/046487; or international Applications No. PCT/US04/042911; PCT/EP2010/070412; or PCT/I B2014/059503.

[1566] Depending on the specific conditions being treated, such agents may be formulated into liquid or solid dosage forms and administered systemically or locally. The agents may be delivered, for example, in a timed- or sustained-low release form as is known to those skilled in the art. Techniques for formulation and administration may be found in Remington, The Science and Practice of Pharmacy (20th ed. 2000). Suitable routes may include oral, buccal, by inhalation spray, sublingual, rectal, transdermal, vaginal, transmucosal, nasal or intestinal administration; parenteral delivery, including intramuscular, subcutaneous, intramedullary injections, as well as intrathecal, direct intraventricular, intravenous, intra-articular, intra-sternal, intra-synovial, intra-hepatic, intralesional, intracranial, intraperitoneal, intranasal or intraocular injections or other modes of delivery.

[1567] For injection, the agents of the disclosure may be formulated and diluted in aqueous solutions, such as in physiologically compatible buffers such as Hank's solution, Ringer's solution, or physiological saline buffer. For such transmucosal administration, penetrants appropriate to the barrier to be permeated are used in the formulation. Such penetrants are generally known in the art.

[1568] Use of pharmaceutically acceptable inert carriers to formulate the compounds herein disclosed for the practice of the disclosure into dosages suitable for systemic administration is within the scope of the disclosure. With proper choice of carrier and suitable manufacturing practice, the compositions of the present disclosure, in particular, those formulated as solutions, may be administered parenterally, such as by intravenous injection.

[1569] The compounds can be formulated readily using pharmaceutically acceptable carriers well known in the art into dosages suitable for oral administration. Such carriers enable the compounds of the disclosure to be formulated as tablets, pills, capsules, liquids, gels, syrups, slurries, suspensions and the like, for oral ingestion by a subject (e.g., patient) to be treated.

[1570] For nasal or inhalation delivery, the agents of the disclosure may also be formulated by methods known to those of skill in the art, and may include, for example, but not limited to, examples of solubilizing, diluting, or dispersing substances such as, saline, preservatives, such as benzyl alcohol, absorption promoters, and fluorocarbons.

[1571] In certain embodiments, oligonucleotides and compositions are delivered to the CNS. In certain embodiments, oligonucleotides and compositions are delivered to the cerebrospinal fluid. In certain embodiments, oligonucleotides and compositions are administered to the brain parenchyma in certain embodiments, oligonucleotides and compositions are delivered to an animal/subject by intrathecal administration, or intracerebroventricular administration. Broad distribution of oligonucleotides and compositions, described herein, within the central nervous system may be achieved with intraparenchymal administration, intrathecal administration, or intracerebroventricular administration.

[1572] In certain embodiments, parenteral administration is by injection, by, e.g., a syringe, a pump, etc. In certain embodiments, the injection is a bolus injection. In certain embodiments, the injection is administered directly to a tissue, such as striatum, caudate, cortex, hippocampus and cerebellum.

[1573] In certain embodiments, methods of specifically localizing a pharmaceutical agent, such as by bolus injection, decreases median effective concentration (EC50) by a factor of 20, 25, 30, 35, 40, 45 or 50. In certain embodiments, the pharmaceutical agent in an antisense compound as further described herein, in certain embodiments, the targeted tissue is brain tissue. In certain embodiments the targeted tissue is striatal tissue. In certain embodiments, decreasing EC50 is desirable because it reduces the dose required to achieve a pharmacological result in a patient in need thereof.

[1574] In certain embodiments, an antisense oligonucleotide is delivered by injection or infusion once every month, every two months, every 90 days, every 3 months, every 6 months, twice a year or once a year.

[1575] Pharmaceutical compositions suitable for use in the present disclosure include compositions wherein the active ingredients are contained in an effective amount to achieve its intended purpose. Determination of the effective amounts is well within the capability of those skilled in the art, especially in light of the detailed disclosure provided herein.

[1576] In addition to the active ingredients, these pharmaceutical compositions may contain suitable pharmaceutically acceptable carriers comprising excipients and auxiliaries which facilitate processing of an active compound into preparations which can be used pharmaceutically. The preparations formulated for oral administration may be in the form of tablets, dragees, capsules, or solutions.

[1577] Pharmaceutical preparations for oral use can be obtained by combining an active compound with solid excipients, optionally grinding a resulting mixture, and processing the mixture of granules, after adding suitable auxiliaries, if desired, to obtain tablets or dragee cores. Suitable excipients are, in particular, fillers such as sugars, including lactose, sucrose, mannitol, or sorbitol; cellulose preparations, for example, maize starch, wheat starch, rice starch, potato starch, gelatin, gum tragacanth, methyl cellulose, hydroxypropylmethyl-cellulose, sodium carboxy methyl-cell ulose (CMC), and/or polyvinylpyrrolidone (PVP: povidone). If desired, disintegrating agents may be added, such as the cross-linked polyvinylpyrrolidone, agar, or alginic acid or a salt thereof such as sodium alginate.

[1578] Dragee cores are provided with suitable coatings. For this purpose, concentrated sugar solutions may be used, which may optionally contain gum arabic, talc, polyvinylpyrrolidone, carbopol gel, polyethylene glycol (PEG), and/or titanium dioxide, lacquer solutions, and suitable organic solvents or solvent mixtures. Dye-stuffs or pigments may be added to the tablets or dragee coatings for identification or to characterize different combinations of active compound doses.

[1579] Pharmaceutical preparations that can be used orally include push-fit capsules made of gelatin, as well as soft, sealed capsules made of gelatin, and a plasticizer, such as glycerol or sorbitol. The push-fit capsules can contain the active ingredients in admixture with filler such as lactose, binders such as starches, and/or lubricants such as talc or magnesium stearate and, optionally, stabilizers. In soft capsules, an active compound may be dissolved or suspended in suitable liquids, such as fatty oils, liquid paraffin, or liquid polyethylene glycols (PEGs). In addition, stabilizers may be added.

[1580] A composition can be obtained by combining an active compound with a lipid. In some embodiments, the lipid is conjugated to an active compound. In some embodiments, the lipid is not conjugated to an active compound. In some embodiments, a lipid comprises a C₁₀-C₄₀ linear, saturated or partially unsaturated, aliphatic chain. In some embodiments, a lipid comprises a C₁₀-C₄₀ linear, saturated or partially unsaturated, aliphatic chain, optionally substituted with one or more C₁₋₄ aliphatic group. In some embodiments, the lipid is selected from the group consisting of: lauric acid, myristic acid, palmitic acid, stearic acid, oleic acid, linoleic acid, alpha-linolenic acid, gamma-linolenic acid, docosahexaenoic acid (cis-DHA), turbinaric acid and dilinoleyl. In some embodiments, a lipid has a structure of any of:

[chemical structure]

[chemical structure]

[1581] In some embodiments, an active compound is any oligonucleotide or other nucleic acid described herein. In some embodiments, an active compound is a nucleic acid of a sequence comprising or consisting of any sequence of any nucleic acid listed in Table 1A. In some embodiments, a composition comprises a lipid and an active compound, and further comprises another component selected from: another lipid, and a targeting compound or moiety. In some embodiments, a lipid includes, without limitation: an amino lipid; an amphipathic lipid; an anionic lipid; an apolipoprotein; a cationic lipid; a low molecular weight cationic lipid; a cationic lipid such as CLinDMA and DLinDMA; an ionizable cationic lipid; a cloaking component; a helper lipid; a lipopeptide; a neutral lipid; a neutral zwitterionic lipid; a hydrophobic small molecule; a hydrophobic vitamin; a PEG-lipid; an uncharged lipid modified with one or more hydrophilic polymers; phospholipid; a phospholipid such as 1,2-dioleoyl-sn glycero-3-phosphoethanolamine; a stealth lipid; a sterol; a cholesterol; and a targeting lipid; and any other lipid described herein or reported in the art. In some embodiments, a composition comprises a lipid and a portion of another lipid capable of mediating at least one function of another lipid. In some embodiments, a targeting compound or moiety is capable of targeting a compound (e.g., a composition comprising a lipid and a active compound) to a particular cell or tissue or subset of cells or tissues. In some embodiments, a targeting moiety is designed to take advantage of cell- or tissue-specific expression of particular targets, receptors, proteins, or other subcellular components; In some embodiments, a targeting moiety is a ligand (e.g., a small molecule, antibody, peptide, protein, carbohydrate, aptamer, etc.) that targets a composition to a cell or tissue, and/or binds to a target, receptor, protein, or other subcellular component.

[1582] Certain example lipids for use in preparation of a composition for delivery of an active compound allow (e.g., do not prevent or interfere with) the function of an active compound. Non-limiting example lipids include: lauric acid, myristic acid, palmitic acid, stearic acid, oleic acid, linoleic add, alpha-linolenic acid, gamma-linolenic acid, docosahexaenoic acid (cis-DHA), turbinaric acid and dilinoleyl.

[1583] As described in the present disclosure, lipid conjugation, such as conjugation with fatty acids, may improve one or more properties of oligonucleotide.

[1584] In some embodiments, a composition for delivery of an active compound is capable of targeting an active compound to particular cells or tissues, as desired. In some embodiments, a composition for delivery of an active compound is capable of targeting an active compound to a muscle cell or tissue.

[1585] In some embodiments, the present disclosure pertains to compositions and methods related to delivery of active compounds, wherein the compositions comprise an active compound a lipid. In various embodiments to a muscle cell or tissue, the lipid is selected from: lauric acid, myristic acid, palmitic acid, stearic acid, oleic acid, linoleic acid, alpha-linolenic add, gamma-linolenic acid, docosahexaenoic acid (cis-DHA), turbinaric acid and dilinoleyl. The example lipids used include stearic acid, oleic acid, alpha-linolenic acid, gamma-linolenic acids, cis-DHA, turbinaric acid and dilinoleyl acid. In these Tables, “TBD” indicates that the particular composition was effective for delivery, but the numerical results were outside the standard range, and thus the final results remain to be determined; however, the compositions indicated as “TBD” in the Tables were efficacious at delivery of an active compound.

[1586] A composition comprising an active compound and any of: stearic acid, oleic acid, alpha-linolenic acid, gamma-linolenic acid, cis-DHA or turbinaric acid, was able to deliver an active compound to gastrocnemius muscle tissue. A composition comprising an active compound and any of: stearic acid, alpha-linolenic, gamma-linoleic, cis-DHA, or turbinaric acid, was able to deliver an active compound to heart muscle tissue. A composition comprising an active compound and any of: stearic acid, oleic acid, alpha-linolenic acid, gamma-linoleic acid, cis-DHA or turbinaric acid, was able to deliver an active compound to quadriceps muscle tissue. A composition comprising an active compound and any of: stearic, oleic, alpha-linolenic, gamma-linolenic, cis-DH A, or turbinaric acid was able to deliver an active compound to the gastrocnemius muscle tissue. A composition comprising an active compound and any of: stearic acid, alpha-linolenic, gamma-linolenic, cis-DHA, or turbinaric acid was able to deliver an active compound to heart muscle tissue. A composition comprising an active compound and any of: dilinoleyl, stearic acid, oleic acid, alpha-linolenic, gamma-linolenic, cis-DHA or turbinaric acid was able to delivery an active compound to the diaphragm muscle tissue.

[1587] Thus A composition comprising a lipid, selected from: lauric acid, myristic acid, palmitic acid, stearic acid, oleic acid, linoleic acid, alpha-linolenic acid, gamma-linolenic acid, docosahexaenoic acid (cis-DHA), turbinaric acid and dilinoleyl, and an active compound is capable of delivering an active compound to extra-hepatic cells and tissues, e.g. muscle cells and tissues.

[1588] Depending upon the particular condition, or disease state, to be treated or prevented, additional therapeutic agents, which are normally administered to treat or prevent that condition, may be administered together with oligonucleotides of this disclosure. For example, chemotherapeutic agents or other anti-proliferative agents may be combined with the oligonucleotides of this disclosure to treat proliferative diseases and cancer. Examples of known chemotherapeutic agents include, but are not limited to, adriamycin, dexamethasone, vincristine, cyclophosphamide, fluorouracil, topotecan, taxol, interferons, and platinum derivatives.

### Example Uses

[1589] In some embodiments, the present disclosure encompasses the use of a composition comprising a lipid and a PNPLA3 oligonucleotide or a single-stranded RNAi agent. In some embodiments, the present disclosure provides methods for delivering a PNPLA3 oligonucleotide or a single-stranded RNAi agent to a target location comprising administering a provided composition. In some embodiments, a provided method delivers a PNPLA3 oligonucleotide or a single-stranded RNAi agent into a cell. In some embodiments, a provided method delivers a PNPLA3 oligonucleotide or a single-stranded RNAi agent into a muscle cell. In some embodiments, a provided method delivers a PNPLA3 oligonucleotide or a single-stranded RNAi agent into a cell within a tissue. In some embodiments, a provided method delivers a PNPLA3 oligonucleotide or a single-stranded RNAi agent into a cell within an organ. In some embodiments, a provided method delivers a PNPLA3 oligonucleotide or a single-stranded RNAi agent into a cell within a subject, comprising administering to the subject a provided composition. In some embodiments, a provided method delivers a PNPLA3 oligonucleotide or a single-stranded RNAi agent into cytoplasm. In some embodiments, a provided method delivers a PNPLA3 oligonucleotide or a single-stranded RNAi agent into nucleus.

[1590] In some embodiments, the present disclosure pertains to methods related to the delivery of a PNPLA3 oligonucleotide or a single-stranded RNAi agent to a cell or tissue, or a cell or tissue in a mammal (e.g., a human subject), which method pertains to a use of a composition comprising a biological agent and a lipid. any one or more additional components selected front a polynucleotide, a dye, an intercalating agent (e.g. an acridine), a cross-linker (e.g. psoralene, or mitomycin C), a porphyrin (e.g., TPPC4, texaphyrin, or Sapphyrin), a polycyclic aromatic hydrocarbon (e.g., phenazine, or dihydrophenazine), an artificial endonuclease, a chelating agent, EDTA, an alkylating agent, a phosphate, an amino, a mercapto, a PEG (e.g., PEG-40K), MPEG, [MPEG]₂, a polyamino, an alkyl, a substituted alkyl, a radiolabeled marker, an enzyme, a hapten (e.g. biotin), a transport/absorption facilitator (e.g., aspirin, vitamin E, or folic acid), a synthetic ribonuclease, a protein, e.g., a glycoprotein, or peptide, e.g., a molecule having a specific affinity for a co-ligand, or antibody e.g., an antibody, a hormone, a hormone receptor, a non-peptidic species, a lipid, a lectin, a carbohydrate, a vitamin, a cofactor, or a drug. In some embodiments, the present disclosure pertains to compositions or methods related to a composition comprising a PNPLA3 oligonucleotide or a single-stranded RNAi agent and a lipid comprising a C₁₀-C₆₀ linear, saturated or partially unsaturated, aliphatic chain. In some embodiments, the present disclosure pertains to compositions or methods related to a composition comprising a PNPLA3 oligonucleotide or a single-stranded RNAi agent and a lipid comprising a C₁₀-C₆₀ linear, saturated or partially unsaturated, aliphatic chain, optionally substituted with one or more C₁₋₄ aliphatic group. In some embodiments, the present disclosure provides chirally controlled oligonucleotide compositions and a lipid selected from the group consisting of: lauric acid, myristic acid, palmitic acid, stearic acid, oleic acid, linoleic acid, alpha-linolenic acid, gamma-linolenic acid, docosahexaenoic acid (cis-DHA), turbinaric acid and dilinoleyl, wherein the composition is suitable for delivery of the oligonucleotide to a muscle cell or tissue, or a muscle cell or tissue in a mammal (e.g., a human subject). In some embodiments, a PNPLA3 oligonucleotide or a single-stranded RNAi agent is a PNPLA3 oligonucleotide comprising one or more chiral internucleotidic linkages, and a provided composition is a PNPLA3 oligonucleotide or a single-stranded RNAi agent. In some embodiments, a PNPLA3 oligonucleotide or a single-stranded RNAi agent is a PNPLA3 oligonucleotide comprising one or more chiral internucleotidic linkages, and a provided composition is a non-chirally controlled oligonucleotide composition of the oligonucleotide.

[1591] In some embodiments, the present disclosure pertains to a method of delivering a PNPLA3 oligonucleotide or a single-stranded RNAi agent to a cell or tissue, wherein the method comprises steps of: providing a composition comprising a PNPLA3 oligonucleotide or a single-stranded RNAi agent and a lipid; and contacting the cell or tissue with the composition; in some embodiments, the present disclosure pertains to a method of administering a PNPLA3 oligonucleotide or a single-stranded RNAi agent to a subject, wherein the method comprises steps of: providing a composition comprising a PNPLA3 oligonucleotide or a single-stranded RNAi agent and a lipid; and administering the composition to the subject. In some embodiments, a lipid comprises a C₁₀-C₅₀ linear, saturated or partially unsaturated, aliphatic chain. In some embodiments, a lipid comprises a C₁₀-C₆₀ linear, saturated or partially unsaturated aliphatic chain, optionally substituted with one or more C₁₋₄ aliphatic group. In some embodiments, the lipid is selected from the group consisting of: lauric acid, myristic acid, palmitic acid, stearic acid, oleic acid, linoleic acid, alpha-linolenic acid, gamma-linolenic acid, docosahexaenoic acid (cis-DHA), turbinaric acid and dilinoleyl.

[1592] In some embodiments, a PNPLA3 oligonucleotide or a single-stranded RNAi agent is a PNPLA3 oligonucleotide, whose sequence is or comprises an element that is substantially complementary to a targeted element in a cellular nucleic acid. In some embodiments, a targeted element is or comprises a sequence element that is associated with a muscle disease, disorder or condition. In some embodiments, a muscle disease, disorder or condition is DMD. In some embodiments, a cellular nucleic acid is or comprises a transcript. In some embodiments, a cellular nucleic acid is or comprises a primary transcript. In some embodiments, a cellular nucleic acid is or comprises a genomic nucleic acid. The present disclosure encompasses the recognition that certain lipids and other compounds are useful for delivery of single-stranded RNAi agents to cells and tissues, e.g., in a mammal or human subject. Many technologies for delivering such agents can suffer from an inability to target desired cells or tissues.

[1593] Delivery of single-stranded RNAi agents to tissues outside the liver remains difficult Juliano reported that, despite advances at the clinical level, effective delivery of oligonucleotides in vivo remains a major challenge, especially at extra-hepatic sites. Juliano 2016 Nucl. Acids Res. Doi: 10.1093/nar/gkw236. Lou also reported that delivery of RNAi agent to organs beyond the liver remains the biggest hurdle to using the technology for a host of diseases. Lou 2014 SciBX 7(48); doi:10.1038/scibx.201.4.1.394.

[1594] The present disclosure encompasses certain surprising findings, including that certain lipids and other compounds are particularly effective at delivering single-stranded RNAi agents, including oligonucleotides, to particular cells and tissues, including cells and tissues outside the liver, including, as non-limiting examples, muscle cells and tissues.

[1595] In some embodiments, provided compositions alter single-stranded RNA interference system so that an undesired target and/or biological function are suppressed. In some embodiments, in such cases provided composition can also induce cleavage of the transcript after hybridization.

[1596] In some embodiments, provided compositions alter single-stranded RNA interference system so a desired target and/or biological function is enhanced, in some embodiments, provided compositions, by incorporating chemical modifications, stereochemistry and/or combinations thereof, effectively suppress or prevent cleavage of a target transcript after contact.

[1597] In some embodiments, each oligonucleotide of a plurality comprises one or more modified sugar moieties and modified internucleotidic linkages. In some embodiments, each oligonucleotide of a plurality comprises two or more modified sugar moieties. In some embodiments, each oligonucleotide of a plurality comprises three or more modified sugar moieties. In some embodiments, each oligonucleotide of a plurality comprises four or more modified sugar moieties. In some embodiments, each oligonucleotide of a plurality comprises five or more modified sugar moieties, in some embodiments, each oligonucleotide of a plurality comprises ten or more modified sugar moieties. In some embodiments, each oligonucleotide of a plurality comprises about 15 or more modified sugar moieties. In some embodiments, each oligonucleotide of a plurality comprises about 20 or more modified sugar moieties, in some embodiments, each oligonucleotide of a plurality comprises about 25 or more modified sugar moieties.

### EXEMPLIFICATION

[1598] The foregoing has been a description of certain non-limiting embodiments of the disclosure. Accordingly, it is to be understood that the embodiments of the disclosure herein described are merely illustrative of the application of the principles of the disclosure. Reference herein to details of the illustrated embodiments is not intended to limit the scope of the claims.

[1599] Certain methods for preparing oligonucleotides and oligonucleotide compositions are widely known in the art and can be utilized in accordance with the present disclosure, including but not limited to those described in WO/2010/064146, WO/2011/005761, WO/2013/012758, WO/2014/010250, US2013/0178612, WO/2014/0.12081, WO/2015/107425, WO/2017/015555, and WO/2017/062862, the methods and reagents of each of which are incorporated herein by reference.

[1600] Applicant describes herein certain examples of provided oligonucleotide and compositions thereof, and methods for preparing, assessing, assaying, and using, etc., certain provided oligonucleotides and compositions thereof.

### Example 1. Example Protocols for Assessing Oligonucleotides

[1601] As a personal having ordinary skill in the art appreciates, many technologies (e.g., reagents, methods, etc.) can be utilized to assess activities and properties of provided oligonucleotides. Below is one example protocol describing reverse transfection of oligonucleotides (using certain oligonucleotides that can function as ssRNAi as examples) in 96 Well Plate format using Lipofectamine®, 2000 (Invitrogen) for assessing oligonucleotide activities in cells:
[1602] 1. Prepare each ssRNAi, preferably in multiple (e.g., 8) doses, e.g., in a final volume of 25 uL. Example initial concentration could be 150 nM; serial dilution, for example in Opti-MEM) medium without serum, typically by a factor of 4.
[1603] 2. Lipofectarnine®, 2000 is desirably mixed gently before use, then diluted 0.25 μl Lipofectamine® 2000 in 25 μl Opti-MEM® medium without serum in a separate vessel. Further gentle mixing can be followed by incubation, e.g., for 5 minutes at room temperature.
[1604] 3. After incubation, diluted Lipofectamine® 2000 (e.g., 25 uL) can be added to the (diluted) ssRNAi molecules (typically comparable volume, e.g., 25 uL). The combination is desirably mixed gently and may be incubated, e.g., for 15 minutes at room temperature, to allow complex formation to occur.
[1605] 4. Complexes are then contacted with cells, for example by adding 100 complete growth medium without antibiotics with 15,000 Hep3B cells to each ssRNAi molecule-Lipofectamine® 2000 complex. This gives a final volume of 150 μl, and final oligo concentrations are 25, 6.25, 1.56, 0.39, 0.097, 0.024, 0.0061, and 0.0015 nM. Mix gently by rocking the plate back and forth.
[1606] 5. Cells are incubated, e.g., at 37° C. in a CO₂ incubator for 48 hours.
[1607] 6. Cells are harvested and mRNA is isolated, e.g., using TurboCapture mRNA kit (Qiagen), as per vendor provided protocol.
[1608] 7. cDNA is prepared, e.g., using Roche cDNA synthesis Kit (Roche), as per vendor provided protocol.
[1609] 8. Target knockdown is quantified, e.g., by Taqman assays using gene-specific Taqman probes multiplexed with HPRT1 probes, in LightCycler® 480 Probes Master mix (Roche), as per vendor provided protocol. Typically, data are normalized, for example relative to a housekeeping gene such as HPRT1 (Hypoxanthine Phosphoribosyltransferase 1).
[1610] 9. If multiple dose strengths/concentrations were utilized, dose-response curves can be prepared for each ssRNAi agent, e.g., using Prism Software. IC₅₀ can be determined if desired.

[1611] Similar protocols can be used for different oligonucleotides targeting other genes and can use different cells.

[1612] Alternatively or additionally, one or more activities and properties of oligonucleotides can be assessed using other technologies (e.g., reagents, kits, methods, etc.) in accordance with the present disclosure. Certain data generated from various types of assays are provided in the Tables, demonstrating for example, unexpectedly high activities, stability, selectivity, etc., of presently provided technologies.

[1613] Various models are available for assessing provided technologies in subjects, in some embodiments, provided technologies show high activities, stability, and/or selectivity when administered to animals. Those skilled in the art are aware of animal systems that are considered to be relevant to and/or predictive for certain relevant human diseases, disorders and/or conditions that might benefit from oligonucleotide therapy as described herein.

### Example 2. Example IC50 of Certain Provided Oligonucleotides

[1614] IC50 of certain oligonucleotides (which may function as antisense oligonucleotides to PNPLA3) measured using a protocol such as that presented in Example 1 are provided in the following Table.

| | | | Oligonucleotide |
|---|---|---|---|
| Wave ID | IC 50 (nM) | Position | Start Position |
| WV-3380 | 1.5 | CDS | 1508 |
| WV-3393 | 1.1 | CDS | 1510 |
| WV-3402 | 1.7 | CDS | 1511 |
| WV-3421 | 1.4 | 3′UTR | 1721 |
| WV-3399 | 0.77 | 3′UTR | 1853 |
| WV-3404 | 1.6 | 3′UTR | 1862 |
| WV-3443 | 1.6 | 3′UTR | 1863 |
| WV-3391 | 0.65 | 3′UTR | 2129 |
| WV-3394 | 1.4 | 3′UTR | 2130 |
| WV-3408 | 0.92 | 3′UTR | 2135 |
| WV-3387 | 1.2 | 3′UTR | 2136 |
| WV-3381 | 1.4 | 3′UTR | 2656 |

### Example 3. Example Compounds for Incorporating Moieties—Synthesis of Tri-Antennary GalNAc (with C12, C5, or Triazine Linkers)

[1615] In some embodiments, the present disclosure provides technologies (e.g., reagents, methods, conjugates, etc.) for incorporating various moieties (e.g., carbohydrate moieties, lipid moieties, targeting moieties, etc.) into provided oligonucleotide. Described herein are certain examples for incorporating carbohydrate moieties. In some embodiments, a carbohydrate moiety may function as a targeting moiety.

[1616] Example 3-1. Synthesis of 1-(((2R,3R,4R,5R,6R)-3-acetamido-4,5-diacetoxy-6-(acetoxymethyl)tetrahydro-2H-pyran 2-yl)oxy)-16,16-bis((3-((3-(5-(((2R,3R,4R,5R,6R)-3-acetamido-4,5-diacetoxy-6-(acetoxy methyl)tetrahydro-2H-pyran-2-yl)oxy)pentanamido)propyl)amino)-3-oxopropoxy)methyl)-5,11,18-trioxo-14-oxa-6,10,17-triazanonacosan-29-oic acid.

[chemical structure]

[chemical structure]

[chemical structure]

[1617] Step 1: To a solution of di-tert-butyl 3,3′-((2-amino-2-((3-(tert-butoxy)-3-oxopropoxy)methyl)propane-1,3-diyl)bis(oxy))dipropanoate (5.0 g, 9.89 mmol) and 12-methoxy-12-oxododecanoic acid (2.416 g, 9.89 mmol) in DMF (4.5 mL) was added HATU (3.76 g, 9.89 mmol) and DIPEA (2.58 ml, 14.83 mmol). The reaction mixture was stirred at room temperature for 5 hrs. Solvent was concentrated under reduced pressure, and diluted with brine, extracted with EtOAc, dried over anhydrous sodium sulfate, and concentrated to give a residue, which was purified by ISCO (120 g gold silica gel cartridge) eluting with 10% EtOAc in hexane to 40% EtOAc in hexane to give di-tert-butyl 3,3′-((2-((3-(tert-butoxy)-3-oxopropoxy)methyl) 2-(12-methoxy-12-oxododecanamido)propane-1,3-diyl)bis(oxy))dipropanoate (5.13 g, 7.01 mmol, 70.9% yield) as a colorless oil. ¹H NMR (400 MHz, Chloroform-d) δ 6.03 (s, 1H), 3.74 . . . 3.61 (m, 15H), 2.45 (t, J=6.3 Hz, 6H), 2.31 (td, J=7.5, 3.9 Hz, 2H), 2.19-2.10 (m, 2H), 1.64-1.59 (m. 4H), 1.46 (s, 27H), 1.32-1.24 (m, 12H); MS (ESI), 732.6 (M+H)⁺.

[1618] Step 2: A solution of di-tert-butyl 3,3′-((2-((3-(tert-butoxy)-3-oxopropoxy)methyl)-2-(12-methoxy-12-oxododecanamido)propane-1,3-diyl)bis(oxy))dipropanoate (5.0 g, 6.83 mmol) in formic acid (50 mL) was stirred at room temperature for 48 hrs. Solvent was evaporated under reduced pressure, co-evaporated with toluene (3×) to give a white solid, which was dried under high vacuum for 2 days. LC-MS and H NMR showed the reaction is not complete. The crude product was redissolved in formic acid (50 mL). The reaction mixture was stirred at room temperature for 24 hrs. LC-MS showed the reaction was complete. Solvent was evaporated under reduced pressure, co-evaporated with toluene (3×), dried over high vacuum to give 3,3′-((2-((2-carboxyethoxy)methyl)-2-(12-methoxy-12-oxododecanamido)propane-1,3-diyl)bis(oxy))dipropanoic acid (4.00 g) as a white solid. MS (ESI): 562.4 (M−H)⁻.

[1619] Step 3: A solution of 3,3′-((2-((2-carboxyethoxy)methyl)-2-(12-methoxy-12-oxododecanamido)propane-1,3-diyl)bis(oxy))dipropanoicacid (3.85 g, 6.83 mmol) and HOBt (3.88 g, 28.7 mmol) in DCM (60 mL) and DMF (15 mL) at 0° C. was added tert-butyl (3-aminopmpyl)carbamate (4.76 g, 27.3 mmol), EDAC HCl salt (5.24 g, 27.3 mmol) and DIPEA (8.33 ml, 47.8 mmol). The reaction mixture was stirred at 0° C. for 15 minutes and at room temperature for 20 hrs. LC-MS showed the reaction was not complete. t-Butyl (3-aminopropyl) carbamate (1.59 g, 9.12 mmol) and EDC HO salt (1.75 g, 9.13 mol) was added into the reaction mixture. The reaction mixture was continually stirred at room temperature for 4 hrs. Solvent was evaporated to give a residue, which was dissolved in EtOAc (300 mL), washed with water (1×), saturated sodium bicarbonate (2×), 10% citric acid (2×) and water, dried over sodium sulfate, and concentrated to give a residue which was purified by ISCO (80 g gold cartridge) eluting with DCM to 30% MeOH in DCM to give methyl 15,15-bis(13,13-dimethyl-5,11-dioxo-2,12-dioxa-6,10-diazatetradecyl)-2,2-dimethyl-4,10,17-trioxo-3,13-dioxa-5,9,16-triazaoctacosan-28-oate (6.61 g, 6.40 mmol, 94% yield over 2 steps) as a white solid. MS (ESI): 1033.5 (M+H)+.

[1620] Step 4: To a solution of methyl 15,15-bis(13,13-dimethyl-5,11-dioxo-2,12-dioxa-6,10-diazatetradecyl)-2,2-dimethyl-4,10,17-trioxo-3,13-dioxa-5,9,16-triazaoctacosan-28-oate (6.56 g, 6.35 mmol) in THE (75 mL) was added aq. LiOH (0.457 g, 19.06 mmol) in water (25 mL). The mixture was stirred at room temperature for overnight. LC-MS showed the reaction was completed. Solvent was evaporated, acidified using 1 N HCl (45 mL), extracted with DCM (3×), dried over anhydrous sodium sulfate, concentrated to give 15,15-bis(13,13-dimethyl-5,11-dioxo-2,12-dioxa-6,10-diazatetradecyl) 2,2-dimethyl-4,10,17-trioxo-3,13-dioxa-5,9,16-triazaoctacosan-28-oic acid (6.31 g, 6.20 mmol, 98% yield) as a white solid. MS (ES): 1019.6 (M+H)⁺.

[1621] Step 5: To a solution of 15,15-bis(13,13-dimethyl-5,11-dioxo-2,12-dioxa-6,10-diazatetradecyl)-2,2-dimethyl-4,10,17-trioxo-3,13-dioxa-5,9,16-triazaoctacosan-28-oic acid (6.31 g, 6.20 mmol) and (bromomethyl)benzene (1.272 g, 7.44 mmol) in DMF (40 mL) was added K₂CO₃ (2.57 g, 18.59 mmol). The mixture was stirred at 40° C. for 4 hrs and at room temperature for overnight. Solvent was evaporated under reduced pressure. The reaction mixture was diluted with EtOAc, washed with water, dried over anhydrous sodium sulfate, concentrated under reduced pressure to give a residue, which was purified by ISCO (80 g cartridge) eluting with DCM to 30% MeOH in DCM to give benzyl 15,15-bis(13,13-dimethyl-5,1 1-dioxo-2,12-dioxa-6,10-diazatetradecyl)-2,2-dimethyl-4,10,17-trioxo-3,13-dioxa-5,9,16-triazaoctacosan-28-oate (6.41 g, 5.78 mmol, 93% yield) as a colorless oil. ¹H NMR (400 MHz, DMSO-d₆) δ 7.80 (t, J=5.7 Hz, 3H), 7.39-7.30 (m, 5H), 6.95 (s, 1H), 6.74 (t, J=5.8 Hz, 3H), 5.07 (s, 2H), 3.53 (J, J=7.3 Hz, 6H), 3.51. (s, 6H), 3.02 (q, J=6.7 Hz, 6H), 2.94-2.85 (m, 6H), 2.29 (dt, J=26.1, 6.9 Hz, 8H), 2.02 (q, J=9.7, 8.6 Hz, 2H), 1.56-1.39 (m, 10H), 1.35 (s, 27H), 1.20 (brs, 14H); MS (ESI): 1019.6 (M+H)⁺.

[1622] Step 6: To a solution of benzyl 15,15-bis(13,13-dimethyl-5,11-dioxo-2,12-dioxa-6,10-diazatetradecyl)-2,2-dimethyl-4,10,17-trioxo-3,13-dioxa-5,9,16-triazaoctacosan-28-oate (2.42 g, 2.183 mmol) in DCM (40 mL) was added 2,2,2-trifluoroacteic acid (8 ml, 105 mmol). The reaction mixture was stirred at room temperature for overnight. Solvent was evaporated under reduced pressure, co-evaporated with toluene (2×), triturated with ether, dried under high vacuum for overnight. Directly use TFA salt for next step.

[1623] Step 7: To a solution of 5-(((2R,3R,4R,5R,6R)-3-acetamido-4,5-diacetoxy-6-(acetoxymethyl)tetrahydro-2H-pyran-2-yl)oxy)pentanoic acid (3.91 g, 8.73 mmol), HBTU (3.48 g, 9.17 mmol) and HOBT (1.239 g, 9.17 mmol) in DCM (25 mL) was added DIPEA (6.08 ml, 34.9 mmol) followed by benzyl 12-((1,19-diamino-10-((3-((3-aminopropyl)amino)-3-oxopropoxy)methyl)-5,15-dioxo-8,12-dioxa-4,16-diazanonadecan-10-yl)amino)-12-oxododecanoate (1.764 g, 2.183 mmol) in DMF (4.0 mL). The mixture was stirred at room temperature for 5 hrs. Solvent was evaporated under reduced pressure to give a residue, which was purified by ISCO (40 g gold column) eluting with 5% MeOH in DCM for 5 column value to remove HOBt followed by 5% to 30% MeOH in DCM to give 1-(((2R,3R,4R,5R,6R)-3-acetamido-4,5-diacetoxy-6-(acetoxymethyl)tetrahydro-2H-pyran-2-yl)oxy)-16,16-bis((3-((3-(5-(((2R,3R,4R,5R,6R)-3-acetamido-4,5-diacetoxy-6-(acetoxymethyl)tetrahydro-2H-pyran-2-yl)oxy)pentanamido)propyl)amino)-3-oxopropoxy)methyl)-5,11,18-trioxo-14-oxa-6,10,17-triazanonacosan-29-oic benzyl ester (3.98 g, 87% yield) as a white solid. ¹H NMR (400 MHz, DMSO-4) 7.82-7.74 (m, 6H), 7.69 (t, J=5.6 Hz, 3H), 7.33-7.27 (m, 5H), 6.94 (s, 1H), 5.16 (d, J=3.4 Hz, 3H), 5.03 (s, 2H), 4.92 (dd, J=11.2, 3.4 Hz, 3H), 4.43 (d, J=8.4 Hz, 3H), 4.02-3.95 (m, 9H), 3.82 (dt, J=11.2, 8.8 Hz, 3H), 3.65 (dt, J=10.5, 5.6 Hz, 3H), 3.51-3.44 (m, 12H), 3.36 (dt, J=9.6, 6.0 Hz, 3H), 3.01-2.95 (m, 12H), 2.29 (t, J=7.4 Hz, 2H), 2.23 (1, J=6.3 Hz, 6H), 2.05 (s, 9H), 1.99 (t, J=7.0 Hz, 8H), 1.94 (s, 9H), 1.84 (s, 9H), 1.72 (s, 9H), 1.50-1.14 (m, 34H); MS (ESI): 1049.0 (M/2+H)⁺.

[1624] Step 8: To a round bottom flask flushed with Ar was added 10% Pd/C (165 mg, 0.835 mmol) and EtOAc (15 mL). A solution of Benzyl protected Iris-GalNAc (1.75 g, 0.835 mmol) in methanol (15 mL) was added followed by triethylsilane (2.67 ml, 16.70 mmol) dropwise. The mixture was stirred at room temperature for 3 hrs. LC-MS showed the reaction was complete, diluted with EtOAc, and filtered through celite, washed with 20% MeOH in EtOAc, concentrated under reduced pressure to give 1 (((2R,3R,4R,5R,6R)-3-acetamido-4,5-diacetoxy-6-(acetoxymethyl)tetrahydro-2H-pyran-2-yl)oxy)-16,16-bis((3-((3-(5-(((2R,3R,4R,5R,6R)-3-acetamido-4,5-diacetoxy-6-(acetoxymethyl)tetrahydro-2H-pyran-2-yl)oxy)pentanamido)propyl)amino)-3-oxopropoxy)methyl)-5,11,18-trioxo-14-oxa-6,10,17-triazanonacosan-29-oic acid (1.67 g, 0.832 mmol. 100% yield) as a white solid. ¹H NMR (400 MHz, DMSO-d₆) δ 11.95 (s, 110, 7.83-7.74 (m, 6H), 7.69 (t, J=5.7 Hz, 3H), 6.93 (s, 1H), 5.16 (d, J=3.4 Hz, 3H), 4.92 (dd, J=11.2, 3.4 Hz, 3H), 4.43 (d, J=8.4 Hz, 3H), 4.01-3.94 (m, 9H), 3.82 (dt, J=11.3, 8.8 Hz, 3H), 3.66 (dt, J=1.0.7, 5.6 Hz, 3H), 3.54-3.43 (m, 12H), 3.41-3.33 (m, 3H), 3.03-2.94 (m, 12H), 2.24 (t, J=7.4 Hz, 10H), 2.14 (t, J=7.4 Hz, 2H), 2.06 (s, 9H), 2.00 (t, J=7.2 Hz, 8H), 1.95 (s, 9H), 1.84 (s. 9H). 1.73 (s, 9H), 1.51-1.14 (m, 34H). MS (ESI): 1003.8 (M/2+H)⁺.

### Example 3-2. Synthesis of 22-(((2R,3R,4R,5R,6R)-3-acetamido-4,5-diacetoxy-6-(acetoxymethyl)tetrahydro-2H-pyran-2-yl)oxy)-7,7-bis((3-((3-(5-(((2R,3R,4R,5R,6R)-3-acetamido-4,5-diacetoxy-6-(acetoxy methyl)tetrahydro-2H-pyran-2-yl)oxy)pentanamido)propyl)amino)-3-oxopropoxy)methyl)-5,12,18-trioxo-9-oxa-6,13,17-triazadocosanoic acid

[chemical structure]

[chemical structure]

[chemical structure]

[1626] Step 1: A solution of di-tert-butyl 3,3-((2-amino-2-((3-(tert-butoxy)-3-oxopropoxy)methyl)propane-1,3-diyl)bis(oxy))dipropanoate (4.0 g, 7.91 mmol) and dihydro-2H-pyran-2,6(3H)-dione (0.903 g, 7.91 mmol) in THE (40 mL) was stirred at 50° C. for 3 hrs and at rt for 3 hrs. LC-MS showed desired product. Solvent was evaporated to give the acid, which was directly used for next step without purification.

[1627] Step 2: To a solution of 5-((9-((3-(tert-butoxy)-3-oxopropoxy)methyl)-2,2,16,16-tetramethyl-4,14-dioxo-3,7,11,15-tetraoxaheptadecan-9-yl)amino)-5-oxopentanoic acid (4.90 g, 7.91 mmol) and (bromomethyl)benzene (1.623 g, 9.49 mmol) in DMF was added anhydrous K₂CO₃ (3.27 g, 23.73 mmol). The mixture was stirred at 40° C. for 4 hrs and at room temperature for overnight. Solvent was evaporated under reduced pressure. The reaction mixture was diluted with EtOAc, washed with water, dried over anhydrous sodium sulfate, concentrated under reduced pressure to give a residue, which was purified by ISCO eluting with 10% EtOAc in hexane to 50% EtOAc in hexane to give di-tert-butyl 3,3′-((2-(5-(benzyloxy)-5-oxopentanamido)-2-((3-(tert-butoxy)-3-oxopropoxy)methyl)propane-1,3-diyl)bis(oxy))dipropanoate (5.43 g, 7.65 mmol, 97% yield) as a colorless oil. ¹H NMR (400 MHz, Chloroform d) δ 7.36-7.28 (m, 5H), 6.10 (s, 1H), 5.12 (s, 2H), 3.70 (s, 6H), 3.64 (t, J=8.0 Hz, 6H), 2.50-2.38 (m, 8H), 2.22 (t, J=7.3 Hz, 2H), 1.95 (p, J=7.4 Hz, 2H), 1.45 (s, 27H); MS, 710.5 (M+H)⁺.

[1628] Step 3: A solution of di-tert-butyl 3,3′-((2-(5-(benyloxy)-5-oxopentanamido)-2-((3-(tert butoxy)-3-oxopropoxy)methyl)propane-1,3-diyl)bis(oxy))dipropanoate (5.43 g, 7.65 mmol) in formic acid (50 mL) was stirred at room temperature for 48 hrs. LC-MS showed the reaction was not complete. Solvent was evaporated under reduced pressure. The crude product was re-dissolved in formic acid (50 mL) and was stirred at room temperature for 6 hrs. LC-MS showed the reaction was complete. Solvent was evaporated under reduced pressure, co-evaporated with toluene (3×) under reduced pressure, and dried under vacuum to give 3,3′-((2-(5-(benzyloxy)-5-oxopentanamido)-24(2-car boxy ethoxy)methyl)propane-1,3-diyl)bis(oxy))dipropanoic acid (4.22 g, 7.79 mmol, 1.02% yield) as a white solid. ¹H NMR (500 MHz, DMSO-d₆) δ 12.11 (s, 3H), 7.41-7.27 (m, 5H), 6.97 (s, 1H), 5.07 (s, 2H), 3.55 (t, J=6.4 Hz, 6H), 3.53 (s, 6H), 2.40 (t, J=6.3 Hz, 6H), 2.37-2.26 (m. 2H), 2.08 (t, J=7.3 Hz, 2H), 1.70 (p, J=7.4 Hz, 2H); MS, 542.3 (M+H)⁺.

[1629] Step 4: A solution of 3,3′-((2-(5-(benzyloxy)-5-oxopentanamido)-2-((2-carboxyethoxy)methyl)propane-1,3-diyl)bis(oxy))dipropanoic acid (4.10 g, 7.57 mmol) and HOBt (4.60 g, 34.1 mmol) in DCM (60 mL) and DMF (15 mL) at 0° C. was added tert-butyl (3-aminopropyl)carbamate (5.94 g, 34.1 mmol), EDAC HCl salt (6.53 g, 34.1 mmol) and DIPEA (10.55 ml, 60.6 mmol). The reaction mixture was stirred at 0° C. for 15 minutes and at room temperature for 20 hrs. LC-MS showed the reaction was not complete. MAC HCl salt (2.0 g) and tert-butyl (3-aminopropyl)carbamate (1.0 g) was added into the reaction mixture. The reaction mixture was stirred at room temperature for 4 hrs. Solvent was evaporated to give a residue, which was dissolved in EtOAc (300 mL), washed with water (1×), saturated sodium bicarbonate (2×), 10% citric acid (2×) and water, dried over sodium sulfate, and concentrated to give a residue which was purified by ISCO (80 g gold cartridge) eluting with DCM to 30% MeOH in DCM to give benzyl 15,15-bis(13,13-dimethyl-5,11-dioxo-2,12-dioxa-6,10-diazatetradecyl)-2,2-dimethyl-4,10,17-trioxo-3,13-dioxa-5,9,16-triazahenicosan-21-oate (6.99 g, 6.92 mmol, 91% yield) as a white solid. ¹H NMR (500 MHz, Chloroform-d) δ 7.38-7.33 (m, 5H), 6.89 (brs, 3H), 6.44 (s, 1H), 5.23 (brs, 3H), 5.12 (s, 2H), 3.71-3.62 (m, 12H), 3.29 (q, J=6.2 Hz, 6H). 3.14 (q, J=6.5 Hz, 6H), 2.43 (dt, J=27.0, 6.7 Hz, 8H), 2.24 (t, J=7.2 Hz, 2H), 1.96 (p, J=7.5 Hz, 2H), 1.64-1.59 (m, 6H), 1.43 (d, J=5.8 Hz, 27H); MS (ESI): 1011.5 (M+H)⁺.

[1630] Step 5: To a solution of benzyl 15,15-bis(13,13-dimethyl-5,11-dioxo-2,12-dioxa-6,10-diazatetradecyl)-2,2-dimethyl-4,10,17-trioxo-3,13-dioxa-5,9,16-triazahenicosan-21-oate (0.95 g, 0.940 mmol) in DCM (5 mL) was added TFA (5 mL). The reaction mixture was stirred at room temperature for 4 hrs. LC-MS showed the reaction was completed. Solvent was evaporated under reduced pressure to give benzyl 5-((1,19-diamino-10-((3-((3 aminopropyl)amino)-3-oxopropoxy)methyl)-5,15-dioxo-8,12-dioxa 4,16-diazanonadecan-10-yl)amino)-5-oxopentanoate as a colorless oil. Directly use for next step without purification.

[1631] Step 6: To a solution of 5-(((2R,3R,4R,5R,6R)-3-acetamido-4,5-diacetoxy-6-(acetoxy methyl)tetrahydro-2H-pyran-2-yl)oxy)pentanoic acid (1.684 g, 3.76 mmol), HBTU (0.1.246 g, 3.29 mmol) and HOBT (0.052 g, 0.376 mmol) in DCM (40 mL) followed by 10-(5-(benzyloxy)-5-oxopentanamido)-N1,N19-dichloro-10-((3-((3-(chloroammonio)propyl)amino)-3-oxopropoxy)methyl)-5,15-dioxo-8,12-dioxa-4,16-diazanonadecane-1,19-diaminium (0.767 g, 0.940 mmol) in DMF (2.0 mL). The mixture was stirred at room temperature for 5 hrs. Solvent was evaporated under reduced pressure to give a residue, which was purified by ISCO (40 g gold column) eluting with DCM to 30% MeOH in DCM to give 22-(((2R,3R,4R,5R,6R)-3-acetamido-4,5-diacetoxy-6-(acetoxymethyl)tetrahydro-2H-pyran 2-yl)oxy)-7,7-bis((3-((3-(5-((2R,3R,4R,5R,6R)-3-acetamido-4,5-diacetoxy-6-(acetoxymethyl)tetrahydro-2H-pyran-2-yl)oxy)pentanamido)propyl)amino)-3-oxopropoxy)methyl)-5,12,18-trioxo-9-oxa-6,13,17-triazadocosanoic benzyl ester (1.11 g, 0.556 mmol, 59% yield) as a white solid. MS (EST): 1000.0 (M/2+H)⁺.

[1632] Step 7: To a round bottom flask flushed with Ar was added 10% Pd/C (100 mg, 0.500 mmol) and EtOAc (10 mL). A solution of 22-(((2R,3R,4R,5R,6R)-3-acetamido-4,5-diacetoxy-6-(acetoxymethyl)tetrahydro-2H-pyran-2-yl)oxy)-7,7-bis((3-((3-(5-(((2R,3R,4R,5R,6R)-3-acetamido-4,5-diacetoxy-6-(acetoxymethyl)tetrahydro-2H-pyran-2-yl)oxy)pentanamido)propyl)amino)-3-oxopropoxy)methyl)-5,12,18-trioxo-9-oxa-6,13,17-triazadocosanoic benzyl ester. (1.00 g, 0.500 mmol) in methanol (10 mL) was added followed by triethylsilane (1.599 ml, 10.01 mmol) dropwise. The mixture was stirred at room temperature for 3 hrs. LC-MS showed the reaction was complete, diluted with EtOAc, and filtered through celite, washed with 20% MeOH in EtOAc, concentrated under reduced pressure to give 22-(((2R,3R,4R,5R,6R)-3-acetamido-4,5-diacetoxy-6-(acetoxymethyl)tetrahydro-2H-pyran-2-yl)oxy)-7,7-bis((3-((3-(5-(((2R,3R,4R,5R,6R)-3 acetamido-4,5-diacetoxy-6-(acetoxymethyl)tetrahydro-2H-pyran-2-yl)oxy)pentanamido)propyl)amino)-3-oxopropoxy)methyl)-5,12,18-trioxo-9-oxa-6,13,17-triazadocosan-1-oic acid (0.9433 g, 0.494 mmol, 99% yield) as a white solid. ¹H NMR (500 MHz, DMSO-d₆) δ7.85-7.78 (m, 6H), 7.72 (t, J=5.7 Hz, 3H), 7.03 (s, 1H), 5.20 (d, J=3.4 Hz, 3H), 4.95 (dd, J=11.2, 3.5 Hz, 3H), 4.47 (d, J=8.3 Hz, 3H), 4.05-3.99 (m, 9H), 3.85 (dt, J=11.0, 8.8 Hz, 3H), 3.69 (dt, J=10.6, 5.8 Hz, 3H), 3.52 (dd, J=1.2.3, 5.6 Hz, 1210, 3.39 (dt, J=1.1.2, 6.3 Hz, 3H), 3.02 (p, J=6.3 Hz, 12H), 2.26 (t, J=6.4 Hz, 6H), 2.17 (t, J=7.5 Hz, 2H), 2.11-2.07 (m, 11H), 2.03 (t, J=7.1 Hz, 6H), 1.98 (s, 9H), 1.87 (s, 9171), 1.76 (s, 9H), 1.53-1.18 (m, 20H); MS (EST): 1909.4 (M+H)⁺.

### Example 3-3. Synthesis of 5-(4-(4-((3-((3-(5-(((2R,3R,4R,5R,6R)-3-acetamido-4,5-diacetoxy-6-(acetoxy methyl)tetrahydro-2H-pyran-2-yl)oxy)pentanamido)propyl)amino)-3-oxopropyl)amino)-6-(bis(3-((3-(5-(((2R,3R,4R,5R,6R)-3-acetamido-4,5-diacetoxy-6-(acetoxymethyl)tetrahydro-2H-pyran 2-yl)oxy)pentanamido)propyl)amino)-3-oxopropyl)amino)-1,3,5-triazin-2-yl)piperazin-1-yl)-5-oxopentanoic acid

[chemical structure]

[chemical structure]

[chemical structure]

[chemical structure]

[1634] Steps 1 to 3: To a solid reagent 2,4,6-trichloro-1,3,5-triazine (0.700 g, 3.80 mmd) in DCM (25 mL) at 0° C. was added tert-butyl 3-aminopropanoate HCl salt (0.690 g, 3.80 mmol) and TEA (0.635 ml, 4.56 mmol). The reaction mixture was stirred at 0° C. for 1 hrs. LC-MS showed the desired product. Solvent was evaporated under reduced pressure to give a residue, which was directly used for next step. To a solution of tert-butyl 3-((4,6-dichloro-1,3,5-triazin-2-yl)amino)propanoate (1.114 g, 3.80 mmol) in DMF (15 mL) was added di-tert-butyl. 3,3′-azanediyldipropanoate (1.039 g. 3.80 mmol) and DIPEA (1.324 ml, 7.60 mmol). The reaction mixture was stirred at room temperature for 2 hrs. LC-MS showed desired product. To the above reaction mixture was added benzyl 5-oxo-5-(piperazin-1-yl)pentanoate (1.103 g, 3.80 mmol) and K₂CO₃ (1.576 g, 11.40 mmol). The reaction mixture was stirred at room temperature for overnight. Diluted with EtOAc, filtered and concentrated under reduced pressure to give a residue, which was purified by ISCO (40 g gold) eluting with 10% EtOAc in hexane to 50% EtOAc in hexane to give di-tert-butyl 3,3′-((4-(4-(5-(benzyloxy)-5-oxopentanoyl)piperazin-1-yl)-6-((3-(tert-butoxy)-3-oxopropyl)amino)-1,3,5-triazin-2 yl)azanediyl)dipropionate (0.90 g, 30%) as a colorless oil. ¹H NMR (500 MHz, Chloroform-d) δ 7.43-7.31 (m, 5H), 5.12 (s, 2H), 3.81-3.66 (m, 8H), 3.60 (dd, J=7.6, 4.8 Hz, 4H), 3.40 (t, J=5.1 Hz, 2H), 2.57-2.44 (m, 8H), 2.39 (t, J=7.4 Hz, 2H), 2.06-1.95 (m, 2H), 1.45 (s, 9H), 0.1.43 (s, 18H); MS (ESI): 784.7 (M+H)⁺.

[1635] Step 4: A solution of di-tert-butyl 3,3-((4-(4-(5-(benzyloxy)-5-oxopentanoyl)piperazin-1-yl)-6-((3-(tert-butoxy)-3-oxopropyl)amino)-1,3,5-triazin-2-yl)azanediyl)dipropanoate (0.90 g, 1.148 mmol) in formic acid (20 mL) was stirred at room temperature for overnight. LC-MS showed the reaction was not completed and solvent was evaporated. Formic acid (20 mL) was added to the reaction mixture and the reaction mixture was stirred at room temperature for overnight. LC-MS showed the reaction was complete. Solvent was concentrated, co-evaporated with toluene (2×) and dried under vacuum for overnight to give 3,3′-((4-(4(5-(benzyloxy)-5-oxopentanoyl)piperazin-1-yl)-6-((2-carboxyethyl)amino)-1,3,5-triazin-2-yl)azanediyl)dipropanoicacid (0.75 g, 1.218 mmol, 106% yield) as a white solid. MS (ESI), 616.5 (M+H)⁺.

[1636] Step 5: A solution of 3,3′-((4-(4-(5-(benzyloxy)-5-oxopentanoyl)piperazin-1-yl)-6-((2-carboxyethyl)amino)-1,3,5-triazin-2-yl)azanediyl)dipropanoic acid (0.707 g, 1.148 mmol) and HOBt (0.651 g, 4.82 mmol) in DCM (60 mL) and DMF (15 mL) at 0° C. was added tert-butyl (3-aminopropyl)carbamate (0.840 g, 4.82 mmol), EDAC HCl salt (0.924 g, 4.82 mmol) and DIPEA (1.400 ml, 8.04 mmol). The reaction mixture was stirred at 0° C. for 15 minutes and at room temperature for 20 hrs. LC-MS showed the reaction was not complete. t-Butyl (3-aminopropyl) carbamate (0.28 g) and EDC HCl salt (0.46 g) was added into the reaction mixture. The reaction mixture was continually stirred at room temperature for 4 hrs. Solvent was evaporated to give a residue, which was dissolved in EtOAc (300 mL), washed with water (IX), saturated sodium bicarbonate (2×), 10% citric acid (2×) and water, dried over sodium sulfate, and concentrated to give a residue which was purified by ISCO (80 g gold cartridge) eluting with DCM to 30% MeOH in DCM to give benzyl 5-(4-(4-(bis(3-((3-((tert butoxycarbonyl)amino)propyl)amino)-3-oxopropyl)amino)-6-((3-((3-((tertbutoxycarbonyl) amino)propyl)amino)-3-oxopropyl)amino)-1,3,5-triazin-2-yl)piperazin-1-yl)-5-oxopentanoate (1.24 g, 1.144 mmol, 100% yield) as a white solid. MS (ESI): 1084.8 (M+H)⁺.

[1637] Step 6: A solution of benzyl 5-(4-(4-(bis(3-((3-((tert-butoxy carbonyl)amino)propyl)amino)-3-oxopropyl)amino)-6-((3-((3-((tertbutoxycarbonyl) amino)propyl)amino)-3-oxopropyl)amino)-1,3,5-triazin-2-yl)piperazin-1-yl)-5-oxopentanoate (328.3 mg 0.303 mmol) in DCM (5.0 mL) was added TFA (3.0 mL). The reaction mixture was stirred at room temperature for 3 hrs. Solvent was evaporated under reduced pressure, use directly for next step without purification. MS (ES): 784.6 (M+H)⁺.

[1638] Step 7: To a solution of 5-(((2R,3R,4R,5R,6R)-3-acetamido-4,5-diacetoxy-6-(acetoxymethyl)tetrahydro-2H-pyran-2-yl)oxy)pentanoic acid (0.570 g, 1.273 mmol) in DCM (6 mL) was added DIPEA (0.40 mL, 2.296 mmol) and perfluorophenyl 2,2,2-trifluoroacetate (0.535 g, 1.910 mmol). The reaction mixture was stirred at room temperature for 2 hrs. Solvent was evaporated under reduced pressure to give a residue, directly use for next step. MS (ES): 614.3 (M+H)⁺. A solution of benzyl 544 (4-((3-((3-amino propyl)amino)-3-oxo propyl)amino)-6-(bis(3-((3-aminopropyl)amino)-3-oxopropyl)amino)-1,3,5-triazin-2-yl)piperazin-1 yl)-5-oxopentanoate (0.238 g, 0.303 mmol) in DCM (15 mL) and DMF (3 mL) was added DIPEA (0.633 ml, 3.64 mmol), and a solution of (2R,3R,4R,5R,6R) 5-acetamido-2-(acetoxytriethyl)-6-((5-oxo-5-(perfluorophenoxy)pentyl)oxy)tetrahydro-2H-pyran-3,4-diyl diacetate (0.781 g, 1.273 mmol) in DCM (6 mL). The reaction mixture was stirred at room temperature for 4 hrs. Solvent was evaporated under reduced pressure to give a residue, which was purified by ISCO (40 g gold) eluting with DCM to 40% MeOH in DCM to give 5-(4-(4-((3-((3-(5-(((2R,3R,4R,5R,6R)-3-acetamido-4,5-diacetoxy-6-(acetoxymethyl)tetrahydro-2H-pyran-2-yl)oxy)pentanamido) propyl)amino)-3-oxopropyl)amino)-6-(bis(3-((3-(5-(((2R,3R,4R,5R,6R)-3-acetamido-4,5-diacetoxy-6-(acetoxymethyl)tetrahydro-2H-pyran 2-yl)oxy)pentanamido)propyl)amino)-3-oxopropyl)amino)-1,3,5-triazin-2-yl)piperazin-1-yl)-5-oxopentanoic benzyl ester (0.47 g, 0.227 mmol, 74.9% yield) as a white solid. ¹H NMR (500 MHz, DMSO-d₆) δ 7.82-7.78 (m, 6H), 7.70 (t, J=5.7 Hz, 3H), 7.3.5-7.28 (m, 5H), 6.63 (brs, 1H), 5.20 (d, J=3.3 Hz, 3H), 5.08 (s, 2H), 4.95 (dd, J=11.2, 3.4 Hz, 3H), 4.47 (d, J=8.4 Hz, 3H), 4.05-3.96 (m, 9H), 3.85 (dt, J=11.1, 8.8 Hz, 3H), 3.72-3.53 (m, 12H), 3.43-3.36 (m, 6H), 3.05-2.97 (m, 12H), 2.41 . . . 2.27 (m, 10H), 2.08 (s, 9H), 2.03 (d, J=7.0 Hz, 6H), 1.98 (s, 9H), 1.87 (s, 9H); 1.75 (s, 9H), 1.47 (s, 9H), 1.53-1.19 (m, 13H); MS (ESI): 1037.0 (M+H)/2′.

[1639] Step 8: To a solution of 5-(4-(4-((3-((3-(5-(((2R,3R,4R,5R,6R)-3-acetamido-4,5-diacetoxy-6-(acetoxymethyl)tetrahydro 2H-pyran-2-yl)oxy)pentanamido)propyl)amino)-3-oxopropyl)amino)-6-(bis(3-((3-(5-(((2R,3R,4R,5R,6R)-3-acetamido-4,5-diacetoxy-6-(acetoxymethyl)tetrahydro-2H-pyran-2-yl)oxy)pentanamido)propyl)amino)-3-oxopropyl)amino)-1,3,5-triazin-2-yl)piperazin-1-yl)-5-oxopentanoic benzyl ester (0.39 g, 0.188 mmol) in EtOAc (10 mL) was added 10% Pd—C (50 mg) followed by 10 mi. MeOH under Ar. triethylsilane (0.601 ml, 3.76 mmol) was added to the reaction mixture slowly. The reaction mixture was stirred at room temperature for 2 hrs. filtered through celite, washed with 50% MeOH in EtOAc, solvents were evaporated under reduced pressure to give 5-(4 (4-((3-((3-(5-(((2R,3R,4R,5R 6R)-3-acetamido-4,5-diacetoxy-6-(acetoxymethyl)tetrahydro-2H-pyran-2-yl)oxy)pentanamido)propyl)amino)-3-oxopropyl)amino)-6-(bis(3-((3-(5-(((2R,3R,4R,5R,6R)-3-acetamido-4,5-diacetoxy-6-(acetoxymethyl)tetrahydro-2H-pyran-2-yl)oxy)pentanamido)propyl)amino) 3-oxopropyl)amino)-1,3,5-triazin-2-yl)piperazin-1 yl)-5-oxopentanoic acid (0.373 g, 100% yield) a white solid. ¹H NMR (500 MHz, DMSO-d₆) δ 7.82-7.78 (m, 6H), 7.71 (t, J=5.7 Hz, 3H), 6.64 (s, 1H), 5.20 (d, J=3.3 Hz, 3H), 4.95 (dd, J=11.2, 3.4 Hz, 3H), 4.47 (d, J=8.5 Hz, 3H), 4.06-3.96 (m, 9H), 3.85 (dt, J=11.1, 8.8 Hz, 3H), 3.73-3.56 (m, 11H), 3.45-3.35 (m, 5H), 3.09-2.98 (m, 13H), 2.37-2.28 (m, 10H), 2.25 (t, J=7.3 Hz, 2H), 2.09 (s, 9H), 2.03 (t, J==7.0 Hz, 6H), 1.98 (s, 9H), 1.88 (s, 9H), 1.76 (s, 9H), 1.74-1.67 (m, 2H), 1.55-1.40 (m, 15H); MS (ESL): 1983.4 (M+Hr.

### Example 4A. Example Compounds for Incorporating Moieties

[1640] Synthesis of 18,18-bis(17-((1S,2R,3R,4R,5S)-4-acetamido-2,3-dihydroxy-6,8-dioxabicyclo[3.2.1]octan-1-yl)-5,11-dioxo-2,16-dioxa-6,10-diazaheptadecyl)-1-((1 S,2R,3R,4R,5S)-4-acetamido-2,3-dihydroxy-6,8-dioxabicyclo[3.2.1]octan-1-yl)-7,13,20-trioxo-2,16-dioxa-8,12,19-triazatetracosan-24-oic acid.

[chemical structure]

[chemical structure]

[1641] Step 1: To a solution of tert-butyl 5-bromopentanoate (4.0 g, 16.87 mmol) in acetone (80 mL) was added NaI (7.59 g, 50.6 mmol). The reaction mixture was stirred at 57° C. for 2 hrs, filtered, and washed with EtOAc. Solvent was evaporated under reduced pressure to give a residue, which was dissolved in EtOAc, washed with water, brine, dried over Na₂SO₄, concentrated to give a residue, which was purified by ISCO (40 g column) eluting with 20% EtOAc in hexane to 50% EtOAc in hexane to give tert-butyl 5-iodopentanoate (4.54 g, 15.98 mmol, 95% yield) as a yellow oil. ¹H NMR (500 MHz, Chloroform-d) δ 3.19 (t, J=6.9 Hz, 2H), 2.24 (t, J=7.3 Hz, 2H), 1.86 (p, J=7.1 Hz, 2H), 1.70 (p, J=7.4 Hz, 2H), 1.45 (s, 9H).

[1642] Step 2: To a solution of N-((1S,2R,3R,4R,5S)-2,3-dihydroxy-1-(hydroxymethyl)-6,8-dioxabicyclo[3.2.1]octan-4-yl)acetamide (600 mg, 2.57 mmol) in DMF (15 mL) was added 2,2-dimethoxypropane (2087 μl, 17.03 mmol) followed by (+/−)-camphor-10-sulphonic acid (264 mg, 1.135 mmol). The reaction mixture was stirred at 70° C. for 24 hrs. The reaction mixture was cooled down to room temperature, and then methanol (2.5 mL) was added. The reaction mixture was stirred at room temperature for 30 minutes and neutralized with TEA (0.10 mL). The solvent was evaporated and the residue was coevaporated with toluene. The residue was purified by ISCO (24 g gold) eluting with EtOAc to 10% MeOH in EtOAc to give N-((3aR,4S,7S,8R,8aR)-4-(hydroxymethyl)-2,2-dimethylhexahydro-4,7-epoxy[1,3]dioxolo[4,5-d]oxepin-8-yl)acetamide (666 mg, 2.437 mmol, 95% yield). ¹H NMR (500 MHz, DMSO-d₆) δ 8.09 (d, J=8.1 Hz, 1H), 5.15-5.05 (m, 2H), 4.26 (d, J=5.8 Hz, 1H), 4.09 (dd, J=7.3, 5.8 Hz, 1H), 3.80-3.60 (m, 5H), 1.83 (s, 3H), 1.37 (s, 3H), 1.26 (s. 3H); MS, 274.3 (M+H)⁺.

[1643] Step 3: To a solution of tert-butyl 5-iodopentanoate (1310 mg, 4.61 mmol) and N-((3aR,4S,7S,8R,8aR)-4-(hydroxy ethyl)-2,2-dimethylhexahydro-4,7-epoxy[1,3]dioxolo[4,5-d]oxepin-8-yl)acetamide 7 (420 mg, 1.537 mmol) in DCM (10.5 mL) was added tetrabutylammonium hydrogensulfate (783 mg, 2.305 mmol) followed by 12.5 M sodium hydroxide solution (7 mL). The reaction mixture was stirred at room temperature for 24 hrs. The reaction mixture was diluted with DCM and water, extracted with DCM (2×). The organic layer was washed with 1 N H01 solution, and dried over sodium sulfate. Solvent was concentrated under reduce pressure to give a residue. The resulting crude material was added ethyl acetate (30 mL) and sonicated for 5 minutes. The result precipitate was filtered, washed with ethyl acetate (10 mL×2). LC-MS showed the filter does not contain desired product and was tetrabutylammonium salt. The filtrate was concentrated under reduced pressure to give a residue, which was purified by ISCO (40 g silica gel gold cartridge) eluting with 50% EtOAc in hexane to EtOAc to give tert-butyl 5-(((3 aR,4S,7S,8R,8aR)-8-acetamido-2,2-dimethylhexahydro-4,7-epoxy[1,3]dioxolo[4,5-d]oxepin-4-yl)methoxy)pentanoate (0.470 g, 1.094 mmol, 71.2% yield) as a yellowish oil. ¹H NMR (500 MHz, Chloroform-d) δ 5.56 (d, J=9.1 Hz, 1H), 4.21 (d, J=5.9 Hz, 1H), 4.12 (dtd, J=7.7, 3.8, 1.7 Hz, 1H), 3.99 (t, J=6.3 Hz, 1H), 3.90 (d, J=9.5 Hz, 1H), 3.77 (d, J=2.0 Hz, 2H), 3.67 (d, J=9.5 Hz, 1H), 3.52 (ddt, J=30.5, 9.2, 5.8 Hz, 2H), 2.23 (t, J=7.1 Hz, 2H), 2.03 (d, J=14.5 Hz, 3H), 1.65-1.55 (m, 7H). 1.44 (s, 9H), 1.35 (s, 3H); MS, 452.4 (M+Na)⁺.

[1644] Step 4: To a solution of benzyl 15,15-bis(13,13-dimethyl-5,11-dioxo-2,12-dioxa-6,10-diazatetradecyl)-2,2-dimethyl-4,10,17-trioxo-3,13-dioxa-5,9,16-triazahenicosan 21-oate (0.168 g, 0.166 mmol) in DCM (3 mL) was added TPA (3 mL). The reaction mixture was stirred at room temperature for 3 hrs. LC-MS showed the reaction was completed. Solvent was evaporated under reduced pressure to give benzyl 5-((1,19-diamino-10-((3-(3-aminopropyl)amino)-3-oxopropoxy)methyl)-5,15-dioxo-8,12-dioxa-4,16-diazanonadecan-10-yl)amino)-5-oxopentanoate as a colorless oil. MS, 710.5 (M+H)⁺. Directly use for next step without purification.

[1645] Step 5: To a solution of tert-butyl 5-(((3aR,4S,7S,8R,8aR)-8-acetamido 2,2-dimethylhexahydro-4,7-epoxy[1,3]dioxolo[4,5-d]oxepin-4-yl)methoxy)pentanoate (28.5 mg, 0.664 mmol) in DCM (5 mL) was added TPA (5 mL) was stirred at room temperature for 4 hrs. LC-MS showed the reaction was complete. Solvent was evaporated to give 5-(((l S,2R,3R,4R,5S)-4-acetamido-2,3-dihydroxy-6,8-dioxabicyclo[3.2.1]octan-1-yl)methoxy)pentanoic acid. MS (ES): 334.3 (M+H)⁺. Directly use for next step without purification.

[1646] Step 6: To a solution of 5-(((1S,2R,3R,4R,5S)-4-acetamido-2,3-dihydroxy-6,8-dioxabicyclo[3.2.1]octan-1-yl)methoxy)pentanoic acid (221 mg, 0.664 mmol) in DCM (10 mL) was added DIPEA (2313 μl, 13.28 mmol), HBTU (208 mg, 0.548 mmol), HOBT (67.3 mg, 0.498 mmol), a solution of benzyl. 5-((1,19-dianion-10-((3-((3-aminopropyl)amino)-3-oxopropoxy)methyl)-5,15-dioxo-8,12-dioxa-4,16-diazanonadecan-10-yl)amino)-5-oxopentanoate (118 mg, 0.166 mmol) (GL08-02) in DMF (3.0 mL) and DCM (5.0 mL). The reaction mixture was stirred at room temperature for overnight. LC MS showed the desired product. Solvent was evaporated under reduced pressure to give a residue, which was purified by ISCO (24 g gold cartridge) eluting with DCM to 80% MeOH in DCM to give benzyl 18,18-bis(17-((1 S,2R,3R,4R,5S)-4-acetamido-2,3-dihydroxy-6,8-dioxabicyclo[3.2.1]octan-1-yl)-5,11-dioxo-2,16-dioxa-6,10-diazaheptadecyl)-1-((1 S,2R,3R,4R,5S)-4-acetamido-2,3-dihydroxy-6,8-dioxabicyclo[3.2.1]octan-1-yl)-7,13,20-trioxo-2,16-dioxa-8,12,19-triazatetracosan-24-oate (272 mg 0.164 mmol, 99% yield) (product @ tube 30 to 42 (40% MeOH in DCM to 60% MeOH in DCM)). ¹H NMR (500 MHz, DMSO-d₆) δ 7.89 (d, J=7.8 Hz, 3H), 7.81 (t, J=5.7 Hz, 3H), 7.75 (s, 3H), 7.34 (q, J=7.5, 6.9 Hz, 5H), 7.05 (s, 1H), 5.07 (s, 5H), 4.83 (d, J=5.3 Hz, 31:1), 4.56 (d, J=0.7.1 Hz, 3H), 3.73 (dd, J=23.3, 9.2 Hz, 6H), 3.64 (d, J=7.0 Hz, 6H), 3.58-3.35 (m, 27H), 3.02 (p, J=6.2 Hz, 12H), 2.33 (t, J=7.6 Hz, 2H), 2.26 (t, J=6.4 Hz, 6H), 2.10 (t, J=7.6 Hz, 2H), 2.04 (t, J=7.4 Hz, 6H), 1.82 (s, 9H), 1.72 (q, J=7.6 Hz, 2H), 1.52-1.39 (m, 18H); MS (ES), 1656.3 (M+H)⁺.

[1647] Step 7: To a solution of benzyl 18,18-bis(17-((1S,2R,3R,4R,5S)-4-acetamido 2,3-dihydroxy-6,8-dioxabicyclo[3.2.1]octan-1-yl)-5,11-dioxo-2,16-dioxa-6,10-diazaheptadecyl)-1-((1 S,2R,3R,4R,5S)-4-acetamido-2,3-dihydroxy-6,8-dioxabicyclo[3.2.1]octan-1-yl)-7,13,20-trioxo-2,16-dioxa-8,12,19 triazatetracosan-24-oate (270 mg, 0.163 mmol) in EtOAc (10 mL) was added 10% Pd—C (50 mg), and MeOH (5.0 mL), and triethylsilane (1042 μl, 6.52 mmol). The reaction mixture was stirred at room temperature for 1 hr, filtered, and concentrated to give 18,18-bis(17-((1S,2R,3R,4R,5S)-4-acetamido-2,3-dihydroxy-6,8-dioxabicyclo[3.2.1]octan-1-yl)-5,11-dioxo-2,16-dioxa-6,10-diazaheptadecyl)-1-((1 S,2R,3R,4R,5S)-4-acetamido-2,3-dihydroxy-6,8-dioxabicyclo[3.2.1]octan-1-yl)-7,13,20-trioxo-2,16-dioxa-8,12,19-triazatetracosan-24-oic acid (246 mg, 0.157 mmol, 96%) yield) as a white solid. ¹H NMR (500 MHz, DMSO-d₆) δ 11.99 (brs, H), 7.89 (d, J=7.9 Hz, 3H), 7.82 (t, 0.1=5.4 Hz, 3H), 7.75 (i, J=5.7 Hz, 3H), 7.03 (s, 1H), 5.07 (d, J=1.6 Hz, 3H), 4.83 (brs, 3H), 4.56 (brs, 3H), 3.79-3.68 (m, 6H), 3.64 (d, J=7.2 Hz, 6H), 3.58-3.34 (m, 27H), 3.02 (p, J=6.3 Hz, 12H), 2.27 (t, J=6.4 Hz, 6H), 2.17 (t, J=7.5 Hz, 2H), 2.08 (t, J=7.5 Hz, 2H), 2.04 (t, J=7.3 Hz, 6H), 1.82 (s, 9H), 1.65 (p, J=7.5 Hz, 2H), 1.54-1.40 (m, 18H); MS(ESI), 1566.3 (M+H)⁺.

### Example 4B

### Synthesis of 18,18-bis(17-((1S,2R,3R,4R,5S)-4-acetamido-2,3-dihydroxy-6,8-dioxabicyclo[3.2.1]octan-1-yl)-5,11-dioxo-2,16-dioxa-6,10-diazaheptadecyl)-1-((1 S,2R,3R,4R,5S)-4-acetamido-2,3-dihydroxy-6,8-dioxabicyclo[3.2.1]octan-1-yl)-7,13,20-trioxo-2,16-dioxa-8,12,19-triazahentriacontan-31-oic acid

[chemical structure]

[1649] 18,18-bis(17-((1 S,2R,3R,4R,5S)-4-acetamido 2,3-dihydroxy-6,8-dioxabicyclo[3.2.1]octan-1-yl)-5,11-dioxo-2,16-dioxa-6,10-diazaheptadecyl)-1-((1 S,2R,3R,4R,5S)-4-acetamido-2,3-dihydroxy-6,8-dioxabicyclo[3.2.1]octan-1-yl)-7,13,20-trioxo-2,16-dioxa-8,12,19-triazahentriacontan-31-oic acid was synthesized using the same procedure as 18,18-bis(17-((1 S,2R,3R,4R,5S)-4-acetamido-2,3-dihydroxy-6,8-dioxabicyclo[3.2.1]octan-1-yl)-5,11-di oxo-2,16-dioxa-6,10-diazaheptadecyl)-1-((1 S2R,3R,4R,5S)-4-acetamido-2,3-dihydroxy-6,8-dioxabicyclo[3.2.1]octan-1-yl)-7,1320-trioxo-2,16-dioxa-8,12,19-triazatetracosan-24-oic acid. ¹H NMR (400 MHz, DMSO-d₆) δ 7.90 (d, J=7.8 Hz, 3H), 7.83 (t, J=5.7 Hz, 3H), 7.76 (t, J=5.7 Hz, 3H), 6.98 (d, J=6.2 Hz, 1H), 5.09 (s, 3H), 3.81-3.69 (m, 6H), 3.69-3.62 (m, 6H), 3.62-3.40 (m, 24H), 3.04 (p, J 6.1 Hz, 9H), 2.28 (t, J=6.4 Hz, 4H), 2.18 (t, J=7.3 Hz, 2H), 2.06 (t, J=7.7 Hz, 6H), 1.84 (s, 6H), 1.48 (tq, J=14.9, 7.4 Hz, 16H), 1.23 (s, 8H). MS(ESI), 1664.0 (M+H)⁺.

### Example 5. Example Compounds for Incorporating Moieties

### Synthesis of 5-(4-(4,6-bis((3-((3-(5-(((2R,3R,4R,5R,6R)-3-acetamido-4,5-diacetoxy-6-(acetoxymethyl)tetrahydro-2H-pyran-2-yl)oxy)pentanamido)propyl)amino)-3-oxopropyl)amino)-1,3,5-triazin-2-yl)piperazin-1-yl)-5-oxopentanoic acid

[chemical structure]

[chemical structure]

[1651] Steps 1 to 2: To a solid reagent 2,4,6-trichloro-1,3,5-triazine (0.500 g, 2.71 mmol) in THE (30 mL) was added tert-butyl 3-aminopropanoate HCl salt (0.985 g, 5.42 mmol) and DIPEA (2.36 ml, 13.56 mmol). The reaction mixture was stirred at room temperature for 5 hrs. LC-MS showed the desired product; MS(ESI): 402.4 (M+H)⁺. Solvent was evaporated under reduced pressure to give a residue, which was directly used for next step. To a solution of di-tert-butyl 3,3′-((6-chloro-1,3,5-triazine-2,4-diyl)bis(azanediyl))dipropionate (1.052 g, 2.71 mmol) in acetonitrile (50 mL) was added benzyl 5-oxo-5-(piperazin-1-yl)pentanoate (1.103 g, 3.80 mmol) and K2CO3 (2.248 g, 16.27 mmol). The reaction mixture was stirred at room temperature for overnight and at 50° C. Diluted with EtOAc, filtered and concentrated under reduced pressure to give a residue, which was purified by ISCO (40 g gold) eluting with 20% EtOAc in hexane to 50% EtOAc in hexane to give di-tert-butyl 3,3′-((6-(4-(5-(benzyloxy)-5-oxopentanoyl)piperazin-1-yl)-1,3,5-triazine-2,4-diyl)bis(azanediyl))dipropionate (1.13 g, 64%) as a white solid. ¹H NMR (400 MHz, Chloroform-d) δ 7.43-7.30 (m, 5H), 5.15 (s, 2H), 3.75 (brs, 4H), 3.63 (brs, 6H). 3.43 (brs, 2H), 2.51 (q, J=7.0, 6.5 Hz, 6H), 2.42 (t, J=7.4 Hz, 2H). 2.09-1.96 (m, 2H), 1.48 (s, 18H); MS (ESI): 656.6 (M+H)⁺.

[1652] Step 3: A solution of di-tert-butyl 3,3′-((6-(4-(5-(benzyloxy)-5-oxopentanoyl)piperazin-1-yl)-1,3,5-triazine-2,4-diyl)bis(azanediyl))dipropionate (1.10 g, 1.68 mmol) in formic acid (20 mL) was stirred at room temperature for overnight. LC-MS showed the reaction was not completed and solvent was evaporated. Formic acid (20 mL) was added to the reaction mixture and the reaction mixture was stirred at room temperature for 5 hrs. LC-MS showed the reaction was complete. Solvent was concentrated, co-evaporated with toluene (2×) and dried under vacuum for overnight to give 3,3′-((6-(4-(5-(berizyloxy)-5-oxopentanoyl)piperazin-1-yl)-1,3,5-triazine-2,4-diyl)bis(azanediyl))dipropionic acid (0.91 g, 100% yield) as a white solid. MS (ESI), 544.2 (M+H)⁺.

[1653] Step 4: A solution of 3,3′-((6-(4(5-(benzyloxy)-5-oxopentanoyl)piperazin-1-yl)-1,3,5-triazine-2,4-diyl)bis(azanediyl))dipropionic acid (0.91 g, 1.68 mmol) and HOBt (0.76 g, 4.36 mmol) in DCM (30 mL) and DMF (3 mL) at 0° C. was added tert-butyl (3-aminopropyl)carbamate (0.840 g, 4.36 mmol), EDC HCl salt (0.836 g, 4.36 mmol) and DIPEA (1.460 ml, 8.39 mmol). The reaction mixture was stirred at 0° C. for 15 minutes and at room temperature for 20 hrs. Solvent was evaporated to give a residue, which was dissolved in EtOAc (300 mL), washed with water (1×), saturated sodium bicarbonate (2×), 10% citric acid (2×) and water, dried over sodium sulfate, and concentrated to give a residue which was purified by ISCO (80 g gold cartridge) eluting with DCM to 30% MeOH in DCM to give benzyl 5-(4-(4,6-bis((3-((3-((tert-butoxycarbonyl)amino)propyl)amino) 3-oxopropyl)amino)-1,3,5-triazin-2-yl)piperazin-1-yl)-5-oxopentanoate (1.11 g, 77% yield) as a white solid. MS (ESI): 857.5 (M+H)⁺.

[1654] Step 5: A solution of benzyl 5-(4-(4,6-bis((3-((3-((tert-butoxycarbonyl)amino)propyl)amino)-3-oxopropyl)amino)-1,3,5-triazin-2-yl)piperazin-1-yl)-5-oxopentanoate (212.3 mg, 0.250 mmol) in DCM (5.0 mL) was added TFA (3.0 mL). The reaction mixture was stirred at room temperature for 3 hrs. Solvent was evaporated under reduced pressure, use directly for next step without purification. MS (ESI): 656.3 (M+H)⁺.

[1655] Step 6: To a solution of 5-(((2R,3R,4R,5R,6R)-3-acetamido-4,5-diacetoxy-6-(acetoxymethyl)tetrahydro-2H-pyran-2-yl)oxy)pentanoic acid (333 mg, 0.740 mmol) in DCM (5 mL) was added DIPEA (2.16 ml, 12.4 mmol), HBTU (235 mg, 0.620 mmol), HOBT (67 mg, 0.50 mmol), a solution of benzyl 5-(4-(4,6-bis((3-((3-aminopropyl)amino)-3-oxopropyl)amino)-1,3,5-triazin-2-yl)piperazin-1-yl)-5-oxopentanoate (163 mg, 0.250 mmol) in DCM (3.0 mL). The reaction mixture was stirred at room temperature for 3 hrs. LC-MS showed the desired product. Solvent was evaporated under reduced pressure to give a residue, which was purified by ISCO (24 g gold cartridge) eluting with DCM to 50% MeOH in DCM to give (2R,2′R,3R,3R,4R,4′R,5R,5R,6R,6′R)-((((((3,3′-((6-(4-(5-(benzyloxy)-5-oxopentanoyl) piperazin-1-yl)-1,3,5-triazine-2,4-diyl)bis(azanediyl))bis(propanoyl))bis(azanediyl))bis(propane-3,1-diyl))bis(azanediyl))bis(5-oxopentane-5,1-diyl))bis(oxy))bis(5-acetamido-2-(acetoxymethyl) tetrahydro-2H-pyran-6,3,4-triyl) tetraacetate (460 mg) containing some HOBt. MS (ESI), 1515.7 (M H)⁺.

[1656] Step 7: To a solution of (2R,2′R,3R,3′R,4R,4′R,5R,5′R,6R,6′R)-((((((3,3′-((6-(4-(5-(benzyloxy)-5-oxopentanoyl)piperazin-1-yl)-1,3,5-triazine-2,4-diyl))bis(azanediyl))bis(propanoyl))bis(azancxliyi))bis(propane-3,1-diyl))bis(azanediyl))bis(5-oxopentane-5,1-diyl))bis(oxy))bis(5-acetamido-2-(acetoxymethyl)tetrahydro-2H-pyran-6,3,4-triyl) tetraacetate (0.44 g, 0.290 mmol) in EtOAc (20 mL) was added 10% Pd—C(40 mg) followed by 2.0 mL MeOH under Ar. Triethylsilane (2.784 ml, 17.43 mmol) was added to the reaction mixture slowly. The reaction mixture was stirred at room temperature for 2 hrs, filtered through celite, washed with 50% MeOH in EtOAc. Solvent were evaporated under reduced pressure to give 5-(4-(4,6-bis((3-((3-(5-(((2R,3R,4R,5R,6R)₃-acetamido-4,5-di acetoxy-6-(acetoxymethyl)tetrahydro-2H-pyran-2-yl)oxy)pentanamido)propyl)amino)-3-oxopropyl)amino)-1,3,5-triazin-2 yl)piperazin-1 yl)-5-oxopentanoic acid (0.43 g, 100% yield) a white solid, MS (ES): 1425.0 (M+H)⁺.

### Example 6. Example Compounds for Incorporating Moieties

### Synthesis of 5-(4-(4,6-bis((3-((3-(5-(((1 S,2R,3R,4R,5S)-4-acetamido-2,3-dihydroxy-6,8-dioxabicyclo[3.2.1]octan-1-yl)methoxy)pentanamido)propyl)amino)-3-oxopropyl)amino)-1,3,5-triazin-2-yl)piperazin-1-yl)-5-oxopentanoic acid

[chemical structure]

Step 1: A solution of benzyl 5-(4-(4,6-bis((3-((3-((tert-butoxycarbonyl)amino)propy)amino)-3-oxopropyl)amino)-1,3,5-triazin-2-yl)piperazin-1-yl)-5-oxopentanoate (212.3 mg, 0.250 mmol) in DC M (5.0 mL) was added TFA (3.0 mL). The reaction mixture was stirred at room temperature for 3 hrs. Solvent was evaporated under reduced pressure, use directly for next step without purification. MS (ESI): 656.3 (M+H)⁺.

[1658] Step 2: To a solution of tert-butyl 5-0(3aR,4S,7S,8R,8aR)-8-acetamido-2,2-dimethylhexahydro-4,7-epoxy[1,3]dioxolo[4,5-d]oxepin-4-yl)methoxy)pentanoate (373 mg, 0.870 mmol) in DCM (5 mL) was added TFA (5 mL) was stirred at room temperature for 4 hrs. LC-MS showed the reaction was complete. Solvent was evaporated to give 5-(((1S,2R,3R,4R,5S)-4-acetamido-2,3-dihydroxy-6,8-dioxabicyclo[3.2.1]octan-1-yl)methoxy)pentanoic acid. MS (ESI): 334.3 (M+H)+. Directly use for next step without purification.

[1659] Step 3: To a solution of 55-(((1 S,2R,3R,4R,5S)-4-acetamido-2,3-dihydroxy-6,8-dioxabicyclo[3.2.1]octan-1-yl)methoxy)pentanoic acid (289 mg, 0.870 mmol) in DCM (5 mL) was added DIPEA (2.16 ml, 12.4 mmol), HBTU (330 mg, 0.870 mmol), HOST (67 mg, 0.50 mmol), a solution of benzyl 5-(4-(4,6-bis((3-((3-aminopropyl)amino)-3-oxopropyl)amino)-1,3,5-triazin-2-yl)piperazin-1-yl)-5-oxopentanoate (163 mg, 0.250 mmol) in DCM (3.0 mL). The reaction mixture was stirred at room temperature for 3 hrs. LC-MS showed the desired product. Solvent was evaporated under reduced pressure to give a residue, which was purified by ISCO (24 g gold cartridge) eluting with DCM to 50% MeOH in DCM to give benzyl 5-(4-(4,6-bis((3-((3-(5-(((1 S,2R,3R,4R,5S)-4-acetamido-2,3-dihydroxy-6,8-dioxabicyclo[3.2.1]octan-1-yl)methoxy)pentanamido)propyl)amino)-3-oxopropyl)amino)-1,3,5-triazin-2-yl)piperazin-1-yl)-5-oxopentanoate (227 mg, 71%). MS (ESI), 0.1287.0 (M+H)⁺.

[1660] Step 4: To a solution of benzyl 5-(4-(4,6-bis((3-((3-(5-(((1S,2R,3R,4R,5S)-4-acetamido-2,3-dihydroxy-6,8-dioxabicyclo[3.2.1]octan-1 yl)methoxy)pentanamido)propyl)amino)-3-oxopropyl)amino)-1,3,5-triazin-2-yl)piperazin-1-yl)-5-oxopentanoate (0.167 g, 0.130 mmol) in EtOAc (10 mL) was added 10% Pd—C(50 mg) followed by 2.0 mL MeOH under Ar. Triethylsilane (1.66 ml, 10.39 mmol) was added to the reaction mixture slowly. The reaction mixture was stirred at room temperature for 2 hrs, filtered through celite, washed with 50% MeOH in EtOAc. Solvents were evaporated under reduced pressure to give 5-(4-(4,6-bis((3-((3-(5-(((1S,2R,3R,4R,5S)-4-acetamido-2,3-dihydroxy-6,8-dioxabicyclo[3.2.1]octan-1-yl)methoxy)pentanamido)propyl)amino)-3-oxopropyl)amino)-1,3,5-triazin-2-yl)piperazin-1-yl)-5-oxopentanoic acid (32 mg, 21% yield) a white solid. MS (ESI): 1196.7 (M+H)⁺.

### Example 7. Example Preparation of Certain Phosphoramidites

[1661] In some embodiments, the preset disclosure provides monomers (phosphoramidites) and methods thereof for oligonucleotide preparation. In some embodiments, provided phosphoramidites comprise 5′-end structures that provides special and/or greatly improved activities and/or properties. In some embodiments, provided phosphoramidites comprise desired chemical moieties, e.g., carbohydrate moieties, lipid moieties, etc., for incorporation into oligonucleotides, in some embodiments, provided phosphoramidites comprise linkers/handles for incorporation of desired chemical moieties, e.g., carbohydrate moieties, lipid moieties, etc. Many technologies can be utilized to prepare phosphoramidites in accordance with the present disclosure, including but not limited to those described in WO/2010/064146, WO/2011/005761, WO/2013/012758, WO/2014/010250, US2013/0178612, WO/2014/012081, WO/2015/107425, WO/2017/015555, and WO/2017/062862, the methods and reagents of each of which are incorporated herein by reference. Provided below as examples are preparation of certain phosphoramidites.

### Example 7-1. Preparation of Thymidine-5′-Dimethylvinyl Phosphonate-2′-Deoxy-3′-CNE Phosphoramidite

[chemical structure]

[chemical structure]

### Preparation of compound 7-1-2

[chemical structure]

[1664] To a solution of compound 7-1-1 (20.00 g, 36.72 mmol, 1.00 eq.) in DMF (100.00 mL) was added imidazole (25.00 g, 367.20 mmol, 10.00 eq.) followed by TBDPSCl (50.47 g, 183.60 mmol, 47.17 mL, 5.00 eq.). The reaction mixture was stirred at 25° C. for 16 h. TLC (Dichloromethane: Methanol=1:1) showed compound 7-1-1 was consumed completely. EtOAc (300 mL) was added and the mixture was washed with water (60 mL*3). The organic phase was dried over Na₂SO₄, filtered and concentrated. The residue was purified by column chromatography on silica gel (Petroleum ether: Ethyl acetate=20:1, 1:1, 1:4). Compound 7-1-2 (30.00 g) was obtained as white foamy solid. ¹H NMR: (CDCl₃, 400 MHz) δ=8.165 (s, 1H), 7.575-7.080 (m, 21H), 6.718-6.741 (m, 4H), 6.473 (d, J=2.8 Hz, 1H), 4.520-4.534 (m, 1H), 4.037-4.043 (d, J==2.4 Hz. 1H), 3.758 (s, 6H), 3.184-3.217 (m, 1H), 2.841-2.874 (m, 1H), 2.319-2.338 (m, 1H), 2.025-2.078 (m, 1H), 1.321 (s, 3H), 1.021 (s, 9H).

### Preparation of compound 7-1-3

[chemical structure]

[1666] To a solution of compound 7-1-2 (25.00 g, 31.93 mmol, 1.00 eq.) in DCM (250 mL) was added TFA (8.37 g, 73.44 mmol, 5.44 mL, 2.30 eq.). The color of the solution turned to red. Et₃SiH (8.17 g, 70.24 mmol, 11.19 mL, 2.20 eq.) was added at 25° C. The reaction mixture was stirred at 25° C. for 2 h and the red solution became colorless. TLC (Petroleum ether:Ethyl acetate=1:1) showed compound 7-1-2 was consumed completely. The solvent was removed under reduced pressure, and the residue was dissolved in EtOAc (100 mL). The organic phase was washed with NaHCO₃ (40 mL), brine, dried over Na₂SO₄, filtered and concentrated. The residue was purified by column chromatography on silica gel (Petroleum ether:Ethyl acetate=20:1, 1:1). Compound 7-1-3 (9.80 g, 56.20% yield, 88% purity) was obtained as white solid. ¹H NMR: (CDCl₃ₛ 400 MHz) δ=8.108 (s, 1H), 7.643 (s, 1H), 7.403-7.412 (m, 6H), 7.269 (d, J=4.8 Hz, 2H), 6.217 (d, J=5.6 Hz, 1H), 4.451 (s, 1H), 3.975 (s, 1H), 3.631 (d, J=12 Hz, 1H), 3.255 (s, 1H), 2.264-2.296 (m, 1H), 2.136-2.184 (m, 1H), 1.957 (s, 1H), 1.859 (s, 3H), 1.090 (s, 9H).

### Preparation of compound 7-1-4

[chemical structure]

[1668] To a solution of compound 7-1-3 (18.00 g, 37.45 mmol, 1.00 eq.) in DCM (500 mL) was added DMP (17.47 g, 41.20 mmol, 12.75 mL, 1.10 eq.) at 0° C. The reaction mixture was stirred at 25° C. for 3 h. TLC (Petroleum ether. Ethyl acetate=1:1) showed the reaction was complete. Na₂SO₃ (sat., 100 mL) and NaHCO₃ (sat. 100 mL) was added successively. The mixture was extracted with DCM (100 mL*3). The organic phase was dried over Na₂SO₄ and concentrated. Compound 7-1-4 (17.92 g, crude) was obtained as yellow oil.

### Preparation of compound 7-1-5

[chemical structure]

[1670] To a solution of compound 7-1-4A (16.08 g, 69.26 mmol, 1.85 eq.) in THF (29 mL) was added t-BuOK (1 M, 69.26 mL; 1.85 eq.) at 0° C. The mixture was stirred at 0° C. for 10 min, then warmed up to 25° C. for 30 min. The above mixture was added to a solution of compound 7-1-4 (17.92 g. 37.44 mmol, 1.00 eq.) in THE (36 mL) at 0° C. The reaction mixture was stirred at 0° C. for 1 h and then allowed to warm up to 25° C. in 80 min. TLC (Dichloromethane:Methanol=20:1) showed the reaction was complete. To the reaction mixture water (200 mL) was added and extracted with EtOAc (300 mL*4). The organic phase was dried (Na₂SO₄), filtered and concentrated. The residue was purified by column chromatography on silica gel (PE (10% DCM):EA=10:1, 1:8). Compound 7-1-5 (15.00 g,) was obtained as yellow solid.

### Preparation of Compound 7-1-6

[chemical structure]

[1672] To a solution of compound 7-1-5 (21.00 g, 35.92 mmol, 1.00 eq.) in THF (60 mL) was added N, N-diethylethanamine; trihydrofluoride (28.95 g, 179.59 mmol, 29.24 mL, 5.00 eq.) at 25° C. The reaction mixture was stirred at 25° C. for 20 h. TLC (Dichloromethane:Methanol=10:1) showed the reaction was complete. The reaction mix Lure was concentrated under reduced pressure and the mix tune was neutralized with Na₂CO₃ (aq., sat) until pH=7. The water phase was freeze-dried. The freeze-drying solid was washed with DCM:MeOH=10:1 (300 mL*2). The organic phase was concentrated. The residue obtained was purified by column chromatography on silica gel (Dichloromethane:Methanol=100:1, 100:8). Compound 7-1-6 (5.20 g, 15.02 mmol, 4.1.81% yield) was obtained as white solid. ¹H NMR: (CDCl₃, 400 MHz) δ=9.521. (s, 1H), 7.120 (s, 1H), 6.974-7.074 (m, 1H), 6.372-6.405 (m, 1H), 5.961-6.050 (m, 1H), 4.684 (s, 1H), 4.504-4.518 (m, 1H), 4.393-4.409 (m, 1H), 3.726-3.775 (m, 6H), 3.151-3.180 (m, 2H), 2.411-2.427 (m, 1H), 1.930-2.218 (m, 1H), 1.927 (s, 3H).

### Preparation of Compound 7-1-7

[chemical structure]

[1674] To a solution of compound 7-1-6 (3.80 g, 10.97 mmol, 1.00 eq.) in DMF (23 mL) was added 5-ethylsulfanyl-2H tetrazole (1.43 g, 10.97 mmol, 1.00 eq.), 1-methylimidazole (1.80 g, 21.94 mmol, 1.75 mL, 2.00 eq.) and 3-bis(diisopropylamino)phosphanyloxy propanenitrile (4.96 g, 16.46 mmol, 5.22 mL, 1.50 eq.). The reaction mixture was stirred at 25° C. under N2 for 3 h. TLC (Dichloromethane:Methanol=10:1) showed the reaction was complete. The reaction mixture was diluted with EtOAc (200 mL). The reaction mixture was washed with aq. saturated. NaHCO₃ solution (20 mL*4), dried over Na₂SO₄ₛ filtered and concentrated under reduced pressure. The column was eluted with MeOH (20 min), EA (20 min), Petroleum ether (20 min), and Petroleum ether/Ethyl acetate (20 min). The residue thus obtained was purified by silica gel column chromatography (elution with Petroleum ether:EtOAc=10:1, 1:1 and then EtOOAC/Acetonitrile=1000:1, 100:2, 100:4). Compound 7-1-7 (4.80 g, 8.78 mmol, 80.04% yield) was obtained as yellow solid. MS: LCMS, Calculated C22H36N4O8P2, 546.2008; Observed in +Ve mode 568.95; 569.43[M+Na]. ¹H NMR: (CDCl₃, 400 MHz) δ=9.489 (s, 1H), 7.233 (s, 1H), 6.835-7.035 (m, 1H), 6.303-6.337 (m, 1H), 5.931-5.983 (m. 1H), 4.388-4.504 (m, 1H), 3.703-3.846 (m, 1H), 3.666-3.694 (m, 6H), 3.533-3.559 (m, 2H), 2.594-2.702 (m, 2H), 2.162-2.578 (m, 2H), 1.863 (s, 3H), 1.111-1.189 (m, 12H). ¹³C NMR (101 MHz, CDCl₃) δ 163.66, 162.54, 150.47, 150.40, 148.68, 148.61, 148.4.1, 148.35, 135.10, 135.01, 118.73, 118.25, 117.76, 117.61, 116.91, 116.85, 116.38, 111.74, 84.83, 84.79, 84.75, 84.72, 84.62, 84.56, 84.53, 84.50, 84.40, 84.33, 77.40, 77.29, 77.09, 76.77, 76.03, 75.87, 75.49, 75.48, 75.34, 75.32, 58.21, 58.19, 58.16, 58.12, 58.00, 57.92, 52.59, 52.55, 52.54, 52.52, 52.49, 52.46, 45.33, 45.27, 43.43, 43.40, 43.30, 43.27, 38.45, 38.40, 38.37, 36.45, 24.62, 24.57, 24.54, 24.49, 24.46, 22.96, 22.94, 22.88, 22.85, 20.47, 20.39, 20.37, 20.30, 20.11, 20.04, 12.50, 12.48. ³¹P NMR (162 MHz, CDCl₃) δ 149.40, 149.38, 19.99, 0.19.64, 0.14.10.

### Example 7-2. Stereopure L-DPSE-5′-DMT-5′VP-dT amidite, 7-2-8

[1675] Preparation of L-DPSE-NOPCl.

[chemical structure]

[1676] L-DPSE (8.82 g, 28.5 mmol) was dried by azeotropic evaporation with anhydrous toluene (60 ml) at 35° C. in a rotary evaporator and further dried in high vacuum for overnight. A solution of this dried L-DPSE and 4-methylmorpholine (5.82 g, 6.33 mL, 57.5 mmol) which was dissolved in anhydrous toluene (50 ml) was added to a solution of PCl₃ (4.0 g, 2.5 mL, 29.0 mmol) in anhydrous toluene (25 ml) placed in 250 mL three neck round bottomed flask which was cooled at −5° C. under argon (start Temp: −2° C., Max: 5° C. temp, 10 min addition) and the reaction mixture was stirred at 0° C. for another 40 min. After that the precipitated white solid was filtered by vacuum under argon using special filter tube (Chemglass: Medium Frit, Airfree, Schlenk). The solvent was removed by rotary evaporator under argon at bath temperature (2.5° C.) and the crude oily mixture was obtained and dried under vacuum overnight (˜15 h) and used for next step.

### Preparation of L-DPSE-5′-DMT 5′VP-dT amidite

[chemical structure]

[1678] Compound 7-2-6 (7.0 g, 20.2 mmol) was dried two times by co-evaporation with 75 mL of anhydrous toluene at 45° C. and kept at high vacuum for overnight. Then the dried Compound 7-2-6, was dissolved in dry THF (70 mL) in a 250 mL three neck flasks under argon, followed by the addition of triethylamine (14 mL, 1.01 mmol) and the mixture was cooled to −4.5° C. To this cooled reaction mixture was added a solution of the crude L-DPSE-NOPCl (28.5 mmol, 1.4 eq, in THF 50 mL) from the previous step via syringe dropwise (˜10 min, maintaining the internal temperature −40 to −35° C.). The reaction mixture was then gradually warmed to 5° C. After 30 min at 5° C., TLC and LC-MS analysis indicated the complete conversion of SM to product (total reaction time 2 h). The reaction mixture was cooled in an ice bath, and was quenched by addition of water (0.36 mL, 20.2 mmol) and stirred for 10 min followed by added anhydrous Mg₂SO₄ (3.0 g. 20.2 mmol). The reaction was filtered through Airfree, Schlenk filter tube, washed with dry THE (50 mL) and evaporated under rotary evaporation at 28° C. to afford the pale-yellow solid of the crude product, which was dried underhigh vacuum for overnight. The dried crude product was purified by 120 silica column (which was pre-deactivated with 3 column volume of ethyl acetate with 5% TEA) using ethyl acetate/hexane mixture with 5% TEA as a solvent. After column purification, fractions were analyzed by TLC and LC-MS and pooled together. Solvent was evaporated in a rotary evaporator at 28° C. and the residue was dried under high vacuum to afford the product as a white solid. Yield: 11.8 g (87%). ¹H NMR (400 MHz, Chloroform-d) δ 7.46 (ddt, J=16.5, 7.6, 2.7 Hz, 4H), 7.33-7.17 (m, 6H), 6.93-6.88 (m, 1H), 6.75 (ddd, J=0.22.6, 17.2, 4.4 Hz, 1H), 6.16 (dd, J=7.5, 6.3 Hz, 1H), 5.85 (ddd, J=19.2, 17.1, 1.8 Hz, 1H), 4.71 (dt, J=8.7, 5.7 Hz, 1H), 4.38 (dp, J=10.7, 3.6 Hz, 1H), 4.15 (tt, J=5.6, 2.7 Hz, 1H), 3.68 (dd, J=11.1, 3.7 Hz, 6H), 3.55-3.29 (m, 2H), 3.09 (tdd, J=10.8, 8.8, 4.3 Hz, 1H), 2.1.1 (ddd, J=13.9, 6.3, 3.3 Hz, 1H), 1.96 (s, 1H), 1.87 (d, J=1.2 Hz, 3H), 1.85-1.73 (m, 2H), 1.70-1.49 (m, 21.1), 1.38 (ddd, J=15.9, 10.4, 6.3 Hz. 2H), 1.26-1.1.1 (m, 2H), 0.60 (s, 3H). 3′P NMR (162 MHz, CDCl₃) δ 152.41, 19.95. ¹³C NMR (101 MHz, CDCl₃) δ 171.07, 163.62, 163.59, 150.21, 150.19, 148.49, 148.43, 136.61, 135.84, 135.15, 134.57, 134.33, 129.48, 129.42, 127.97, 127.93, 127.81, 118.38, 116.50, 111.52, 85.02, 84.72, 84.70, 84.51, 84.48, 79.25, 79.16, 77.40, 77.28, 77.08, 76.76, 74.93, 74.91, 74.83, 74.81, 68.01, 67.98, 60.35, 52.60, 52.55, 52.47, 52.42, 47.03, 46.67, 38.12, 38.08, 27.18, 25.85, 25.82, 21.01, 17.58, 17.54, 14.19, 12.58, −3.00, −3.27. MS: LCMS, Calculated C32H41N3O8P2Si, 685.7255: Observed in +Ve mode: 686.21 [M+H], 708.14 [M+Na].

### Example 7-3. Synthesis of 5′-DMT-2′OMe-5-Lipid-3′-CNE Phosphoramidite—Incorporation of Desired Moieties Through Nucleobases

[chemical structure]

### Preparation of Compound 7-3-2

[chemical structure]

[1681] A mixture of compound 7-3-1 (13.00 g, 18.94 mmol), prop-2-yn-1-amine (2.09 g, 37.87 mmol, 2.43 mL), CuI (901.63 mg, 4.73 mmol), Pd(PPh₃)₄ (2.19 g, 1.89 mmol) and TEA (3.83 g, 37.87 mmol, 5.25 mL) in DMF (130 mL) was degassed and purged with N₂ for 3 times, and then the mixture was stirred at 25° C. for 12 hour under N₂ atmosphere and dark. LC-MS showed Compound 7-3-1 was consumed completely and one main peak with desired MS was detected. The mixture was concentrated in vacuo. The residue was purified by column chromatography (SiO₂, Dichloromethane/Methanol 100/1 to 0:1). Compound 7-3-2 (11.00 g, crude) was obtained as a yellow solid. ¹H NMR. (400 MHz, CDCl₃): δ=8.23 (s, 1H), 7.48-7.14 (m, 13H), 6.83 (br d, J=7.3 Hz, 5H), 5.94 (br s, 1H), 4.48 (br t, J=5.8 Hz, 2H), 4.05 (br d, J=6.4 Hz, 2H), 3.93 (br d, J=2.9 Hz, 1H), 3.81-3.70 (m, 8H), 3.62 (s, 4H), 3.52 (br d, J=11.0 Hz, 2H), 3.35 (br d, J=9.0 Hz, 1H). LCMS: (M+H⁺): 614.2. TLC (Dichlormethane/Methanol=10:1) Rf=0.19.

### Preparation of Compound 7-3-3

[chemical structure]

[1683] To a solution of palmitic acid (5.06 g, 19.72 mmol) in DCM (130 mL) was added TEA (3.63 g, 35.85 mmol, 4.97 mL), EDCI (5.15 g, 26.89 mmol), HOBt (3.63 g, 26.89 mmol), and Compound 7-3-3 (11.00 g, 17.93 mmol). The mixture was stirred at 25° C. for 1 hour. LC-MS showed Compound 7-3-3 was consumed completely and one main peak with desired MS was detected. The mixture was concentrated in vacuo. The residue was purified by column chromatography (SiO₂, Dichloromethane:Ethyl acetate=10/1 to 0:1 Dichloromethane:Ethyl acetate=100/1 to 0:1). Compound 7-3-3 (6.20 g 40.58% yield) was obtained as a yellow solid. ¹H NMR (400 MHz, CDCl₃): δ=8.25 (s, 1H), 7.50-7.14 (m, 10H), 6.90-6.77 (m, 4H), 5.93 (d, J=0.0 Hz, 1H), 5.01 (br s, 1H), 4.53-4.44 (m, 1H), 4.06 (br d, J=0.8 Hz, 1H), 3.94 (dd, J=2.0, 5.1. Hz, 1H), 3.83-3.73 (m, 9H), 3.63 (s, 3H), 3.55-3.48 (m, 1H), 3.39 (dd, J=0.5, 11.1 Hz, 1H), 2.79 (q, J=7.1 Hz, 1H), 1.85-1.76 (m, 2H), 1.50-1.41 (m, 2H), 1.24 (br s, 22H), 0.87 (t, J=6.7 Hz, 3H). ¹³CNMR (100 MHz, CDCl₃): δ=172.37, 162.32, 158.66, 158.58, 158.55, 149.58, 144.63, 142.49, 135.55, 135.44, 130.14, 130.00, 129.94, 128.08, 127.86, 126.91, 113.51, 113.35, 99.62, 89.56, 87.56, 86.85, 83.77, 83.68, 74.14, 68.49, 61.77, 58.82, 55.24, 45.30, 36.10, 31.89, 29.84, 29.67, 29.63, 29.49, 29.37, 29.33, 25.42, 22.66, 14.79, 14.11, 9.74. LCMS: (M+Hr): 850.4.

### Preparation of 5′-DMT-2′OMe-5-Lipid 3′-CNE phosphoramidite

[chemical structure]

[1685] Compound 7-3-3 (2.8 g, 3.29 mmol) was co-evaporated with anhydrous toluene two times (25 mL×2) and dried under high vacuum overnight. The dried foamy solid was dissolved in anhydrous DMF (5 ml) and was added 5-ethylthio-1H-tetrazole (0.43 g, 3.29 mmol), N-methylimidazole (0.052 mL, 0.66 mmol) followed by 2-cynoethyl-N,N,N′,N′-tetraisopropylphosphordiamidite (1.49 g, 4.93 mmol). The reaction mixture was stirred at room temperature under argon atmosphere for overnight. After TLC indicated completion, the reaction was diluted with EtOAc (70 mL) and washed with aq. saturated. NaHCO₃ solution (10 mL), and dried over Mg₂SO₄. The solvent was evaporated under reduced pressure and dried in high vacuum for night. The dried crude product was purified by Combi-Flash Rf (Teledyne ISCO) using 80 g silica column (which was pre-deactivated with 3 column volume of ethyl acetate with 5% TEA) with Hexane/Ethyl acetate/Acetonitrile which contains 5% TEA as an eluent to afford 5′-DMT-2′OMe-5-Lipid-3′CNE phosphoramidite as a foamy solid. Yield 3.1 g (90%). ³¹P NMR (162 MHz, CDCl₃) δ 150.58(s) 150.26(s). ¹³C NMR (101 MHz, CDCl₃) δ 172.20, 172.18, 161.78, 161.66, 158.70, 158.68, 149.45, 149.35, 144.71, 144.57, 142.69, 142.62, 137.91, 135.63, 135.53, 135.49, 135.40, 130.16, 130.11, 128.08, 128.06, 128.0.1, 127.00, 126.97, 117.71, 117.51, 113.39, 113.36, 113.32, 99.75, 99.46, 89.30, 89.26, 88.49, 88.00, 87.05, 86.84, 83.86, 83.04, 82.98, 82.93, 82.66, 77.39, 77.27, 77.07, 76.75, 74.45, 74.30, 69.88, 69.77, 69.64, 62.10, 61.24, 58.94, 58.92, 58.65, 58.47, 58.44, 57.97, 57.76, 55.30, 55.27, 43.35, 43.32, 43.23, 43.19, 36.11, 36.09, 33.26, 31.90, 29.88, 29.67, 29.65, 29.63, 29.58, 29.50, 29.37, 29.33, 25.41, 24.70, 24.64, 24.61, 24.57, 24.54, 24.50, 22.66, 20.47, 20.40, 20.34, 20.27, 14.82, 14.09. III NMR (400 MHz, Chloroform-d) δ 7.40 (dd, J=10.5, 7.6 Hz, 2H), 7.35-7.12 (m, 7H), 6.78 (ddd, J=9.0, 4.2, 2.7 Hz, 4H), 4.82 (dt, J=22.1, 4.9 Hz, 1H), 4.57-4.38 (m, 1H), 4.24-4.10 (m, 1H), 4.06-3.96 (m, 1H), 3.86-3.67 (m, 7H), 3.67-3.58 (m, 2H), 3.57-3.39 (m, 6H), 3.25 (ddd, J=13.5, 11.3, 2.8 Hz, 1H), 2.55 (t, J=6.1 Hz, 1 ff), 2.30 (t, J=6.2 Hz, 1H), 1.71 (qd, J=7.4, 7.0, 1.4 Hz, 2H), 1.38 (dtt, J=10.5, 7.7, 2.8 Hz, 2H), 1.09 (dd, J=6.7, 5.1 Hz, 17H), 0.97 (d, J=6.8 Hz, 3H), 0.80 (t, J=6.6 Hz, 3H). MS: LCMS: Calculated, C59H82N5O10P; 1051.5730; Observed+Ve mode: m/z 1153.69 [M+Et₃N].

### Example 7-4. Synthesis of 5′-(R)-C-Me-5′-DMT-dT-CNE amidite

[chemical structure]

### Preparation of Compound 7-4-6B

[chemical structure]

[1688] To a solution of compound 7-4-5 (46.00 g, 124.83 mmol) in a mixture of EtOAc (460.00 mL) and sodium formate (353.17 g, 5.19 mol) dissolved in Water (1.84 L), and then [[(1R,2R)-2-amino-1,2-diphenyl-ethyl]-(p-tolylsulfonyl)amino]-chloro-ruthenium; 1-isopropyl-4-methyl-benzene (1.59 g, 2.50 mmol) was added. The resulting two-phase mixture was stirred for 12 h at 25° C. under N2. TLC showed the starting material was consumed. The mixture was extracted with EtOAc (50 mL*3). The combined organic was washed with brine (30 mL), dried over Na₂SO₄, filtered and concentrated to get the crude. The residue was purified by re-crystallization from Petroleum ether/Ethyl acetate=5:1 to give the compound 7-4-6B as a white solid (36.00 g, 77.83% yield) as a white solid. ¹H NMR (400 MHz, DMSO-d6): δ=11.31 (s, 1H), 7.67 (s, 1H), 6.16 (dd. J=5.5, 8.8 Hz, 1H), 5.05 (d, J=5.1. Hz, 1H), 4.49 (br d, J=0.1 Hz, 1H), 3.78-3.70 (m, 1H), 3.55 (d, J=3.7 Hz, 1H), 2.20-2.09 (m, 1H), 1.96 (br dd, J=5.7, 13.0 Hz, 1H), 1.77 (s, 3H), 1.11 (d, J=4 Hz, 3H), 0.87 (s, 9H), 0.09 (s, 6H). HPLC: HPLC purity: 97.7%. SFC: SFC purity: 99.1%. TLC (Petroleum ether/Ethyl acetate=1:1) Rf=0.37.

### Preparation of Compound 7-4-7B

[chemical structure]

[1690] Compound 7-4-6B (18.00 g, 48.58 mmol) was dried by azeotropic distillation on a rotary evaporator with pyridine (100 mL) and toluene (100 mL*2). A solution of compound 7-4-6B (18.00 g 48.58 mmol) and DMTCl (1.89 g, 5.59 mmol) in the mixture of pyridine (180.00 mL) and THF (720.00 mL) was degassed and purged with N₂ for 3 times and then AgNO₃ (14.19 g, 83.56 mmol) was added. The mixture was stirred at 25° C. for 15 hr. TLC showed the starting material was consumed. MeOH (5 mL) was added and stirred for 15 rein and then the mixture was filtered and the cake was washed with toluene (300 mL*3). The filtrate was concentrated to obtain the compound 7-4-7B as a yellow oil (65.38 g, crude). The mixture was used directly to next step without any purification. TLC (Petroleum ether/Ethyl acetate) Rf=0.63.

### Preparation of 5′-(R)-C-Me-5′-DMTr-dT

[chemical structure]

[1692] To a solution of compound 7-4-7B (65.38 g, 97.16 mmol) in THF (650.00 mL) was added TBAF (1 M, 184.60 mL). The mixture was stirred at 25° C. for 12 hours. TLC showed the starting material was consumed. The mixture was concentrated to provide the crude and then sat. NaCl (5% aq., 200 mL*2) was added and the mixture was extracted with EtOAc (200 mL*3). The combined organic phase was dried over Na₂SO₄, filtered and concentrated to provide the crude product, which was purified by MPLC (Petroleum ether:Ethyl acetate 5:1, 1:1, 1:4, 5% TEA) to provide 5′-(R)-C-Me-5′-DMTr-dT as a white solid (47.50 g, 85.03 mmol, 87.52% yield). ¹H NMR (400 MHz, DMSO-d6): δ=11.32 (s, 1H), 7.46 (br d, Hz, 2H), 7.37-7.25 (m, 6H). 7.23-7.16 (m, 110, 7.07 (s, 1H), 6.89 (dd, J=4.6, 8.5 Hz, 4H), 6.12 (t, J=7.2 Hz, 1H), 5.27 (d, J=4.6 Hz, 1H), 4.54-4.46 (m, 1H), 3.73 (d, J=1.8 Hz, 6H), 3.62 (t, J=2.9 Hz, 1H), 3.40-3.34 (m, 1H), 2.09-2.02 (m, 2H), 1.40 (s, 3H), 0.77 (d, J=2 Hz, 3H). ¹³C NMR (101 MHz, DMSO-d6): δ=163.98, 158.58, 150.81, 146.95, 137.11, 136.79, 135.76, 130.49, 130.41, 128.20, 128.15, 127.04, 11.3.54, 113.52, 110.16, 89.87, 86.24, 83.35, 70.28, 70.05, 60.20, 55.47, 55.35, 21.20, 17.82, 14.52, 12.08. HPLC: HPLC purity: 98.7%. LC-MS: (M−H⁺)=557.2; LCMS purity: 98.9%. SFC: SFC purity: 100.0%. TLC (Petroleum ether/Ethyl acetate=1:1, 5% (TEA) Rf=0.02.

### Preparation of 5′-(R)-C-Me-5′-DMT-dT-CNE-amidite

[chemical structure]

[1694] 5′-(R)-C-Me-5′-OMT-dT (5 g, 8.95 mmol) was dried with toluene (50 mL). To a solution of DIEA (1.39 g. 10.74 mmol, 1.87 mL) and 5′-(R)-C-Me-5′-DMT-dT (5 g, 8.95 mmol) in anhydrous DCM (50 mL) was added compound 7-4-1 (2.76 g, 9.40 mmol) under N₂ at 0° C. The mixture was stirred at 15° C. for 2 h. TLC showed the starting material was consumed and two new spots were found. The mixture was quenched by addition of saturated aq. NaHCO₃ (20 mL) and extracted with DCM (30 mL*3). The combined organic phase was dried over Na₂SO₄, filtered and concentrated to provide the crude product, which was purified on a Combiflash instrument from Teledyne. A 40 g silica gel cartridge column was first pre-treated by eluting with 10% EtOAc/Petroleum ether containing 5% Et₃N (300 mL). The crude product was dissolved in a 2:1 volume:volume mixture of methylene chloride:petroleum ether containing 5% Et₃N and loaded onto the column. After loading, the purification process was run using the following gradient: 10 to 50% EtOAc/Petroleum ether containing 5% Et₃N. Fractions were collected. After evaporation of the solvent, 5′-(R)-C-Me-5-DMT-dT-CNE-amidite was obtained as a white solid (3.6 g, 53% yield). ¹H NMR (400 MHz, CHLOROFORM-d) 8=8.11 (br s, 1H), 7.53 (br d, J=7.7 Hz, 3H), 7.42 (br t, J=8.2 Hz, 4H), 7.32-7.17 (m, 4H), 7.07-6.99 (m, 1H), 6.84 (br d, J=8.2 Hz, 4H), 6.31 (br dd, J=5.5, 8.7 Hz, 1H), 4.94 (br s, 1H), 3.96-3.73 (m, 10H), 3.72-3.41 (m, 4H), 2.65 (td, J=6.1, 18.0 Hz, 2H), 2.53-2.37 (m, 1. H). 2.10 (br d, J=8.2 Hz, 1H), 1.47 (br. s. 4H). 1.33-1.16 (m, 15H). 1.00-0.90 (m, 3H). ³¹P NMR (162 MHz, CHLOROFORM-d) 8=148.81 (s, 1P), 148.35 (s, 1P).

### Example 7-5. Synthesis of 5′-(S)-C-Me-5′-DMT-dT-CNE amidite

[chemical structure]

[chemical structure]

### Preparation of Compound 7-5-2

[chemical structure]

[1697] To a solution of compound 7-5-1 (63.00 g, 176.72 mmol) in the mixture of H₂O (250.00 mL) and MeCN (250.00 mL) was added PhI (OAc)₂ (125.23 g, 388.79 mmol) and TEMPO (5.56 g, 35.34 mmol) at 10° C. The mixture was stirred at 25° C. for 2 hours. TLC (Petroleum ether/Ethyl acetate=1:1, Rf=0) showed the starting material was consumed. The mixture was concentrated, and MTBE (1 L) was added. The mixture was stirred for 0.5 h and then filtered. The cake was washed with MTBE (1 L*2), and dried to provide compound 7-5-2 as a white solid (126 g, 96.23% yield). ¹H NMR. (400 MHz, DMSO): δ=11.21 (s, 1H), 7.89 (d, J=1.0 Hz, 1H), 6.18 (dd, J=5.9, 8.6 Hz, 1H), 4.61-4.41 (m, 1H), 4.17 (d, J=0.9 Hz, 1H), 2.51-2.26 (m. 3H), 2.09-1.85 (m, 2H), 1.74-1.58 (m, 3H). 0.90-0.58 (m, 10H), 0.00 (d, J=2.0 Hz, 6H). LC-MS: (M+H⁺): 371.1. TLC (Petroleum ether/Ethyl acetate=1:1) Rf=0.

### Preparation of Compound 7-5-3

[chemical structure]

[1699] To a solution of compound 7-5-2 (50.00 g, 134.96 mmol) in DCM (500.00 mL) was added DIEA (34.89 g, 269.92 mmol, 47.15 mL) and 2,2-dimethylpropanoyl chloride (21.162, 175.45 mmol). The mixture was stirred at −10-0° C. for 1.5 hours. TLC showed the starting material was consumed. The mixture in DCM was used directly for next step. TLC (Petroleum ether/Ethyl acetate=1:1) Rf=0.15.

### Preparation of Compound 7-5-4

[chemical structure]

[1701] To compound 7-5-3 in DCM was added TEA (40.94 g, 404.55 mmol, 56.08 mL) and N-methoxymethanamine hydrochloride (19.73 g, 202.27 mmol). The mixture was stirred at 0° C. for 1 h. TIC showed the starting material was consumed. The mixture was washed with HCl (1N, 100 mL) and then aqueous NaHCO₃ (100 mL). The organic layer was dried over Na₂SO₄, filtered and concentrated to provide the crude product, which was purified by silica gel chromatography (Petroleum ether/Ethyl acetate-30/1, 0/1) to afford compound 7-5-4 as a white solid (95.5 g, 85.63% yield). ¹H NMR. (400 MHz, CDCl₃): δ=8.29 (s, 1H), 8.19 (br s, 1H), 6.46 (dd, J=5.1, 9.3 Hz, 1H), 4.71 (s, 1H), 4.38 (d, J=4.2 Hz, 1H), 3.65 (s, 3H), 3.15 (s, 3H), 2.18-2.08 (m, 1H), 2.00-1.90 (m, 1H), 1.87 (d, J==0.1.1 Hz, 3H), 0.88-0.74 (m, 10H), 0.00 (d, J=3.7 Hz, 6H). TLC (Petroleum ether/Ethyl acetate=1:1) Rf=0.43.

### Preparation of Compound 7-5-5

[chemical structure]

[1703] To a solution of compound 7-5-4 (115.00 g, 278.09 mmol) in THE (1.20 L) was added MeMgBr (3 M, 185.39 mL) at 0° C. The mixture was stirred at 0° C. for 2 h. TLC showed the starting material was consumed. To the mixture was added water (1 L) at 0° C. and the mixture was extracted with EtOAc (300 mL*2). The combined organic phase was dried over Na₂SO₄, filtered and concentrated to provide the compound 7-5-5 as a white solid (100.00 g, 97.58% yield). The mixture was used directly without further purification. ¹H NMR (400 MHz, CDCl₃): δ=8.81 (br s, 1H), 7.95 (s, 1H), 6.41 (dd, J=0.6, 8.1 Hz, 1H), 4.60-4.40 (m, 2H), 2.40-2.16 (m, 4H), 1.98 (s, 3H), 1.02-0.83 (m, 10H), 0.14 (d, J=3.3 Hz, 6H), 0.20-0.00 (m, 1H). TLC (Petroleum ether/Ethyl acetate=1:1) Rf=0.68.

### Preparation of compound 7-5-6A

[chemical structure]

[1705] To a solution of compound 7-5-5 (46.00 g, 124.83 mmol) in the mixture of EtOAc (460.00 mL) and sodium formate (353.17 g, 5.19 mol) dissolved in water (1.84 L), and N-[(1S,2S)-2-amino-1,2-diphenyl-ethyl]-4-methyl-benzenesulfonamide chlororuthenium; 1-isopropyl-4-methyl-benzene (1.59 g, 2.50 mmol) was added. The resulting two-phase mixture was stirred for 12 h at 25° C. under N2. TLC showed the starting material was consumed. The mixture was extracted with EtOAc (500 mL*3). The combined organic was washed with brine (300 mL), dried over Na₂SO₄, filtered and concentrated to provide the crude product. The mixture was purified by MPLC (Petroleum ether/MTBE==10:1 to 1:1) seven times to provide compound 7-5-6A as a yellow oil (25.6 g, 57.53% yield). ¹H NMR (400 MHz, DMSO-d6): δ=11.28 (s, 1H), 7.85 (s, 1H), 6.16 (t, J=6.8 Hz, 1H), 5.04 (d, J=4.6 Hz, 1H), 4.46-4.29 (m, 1H), 3.79 (br t, J=6.8 Hz, F), 3.59 (br s, 1H), 3.32 (s, 1H), 2.21-2.09 (m, 1H), 2.06-1.97 (m, 1H), 1.76 (s, 3H), 1.17-1.08 (m, 4H), 0.91-0.81 (m, 1 OH), 0.08 (s, 6H). SFC: SFC purity: 98.6%. TLC (Petroleum ether/Ethyl acetate=1:1.) Rf=0.38.

### Preparation of compound 7-5-7A

[chemical structure]

[1707] Compound 7-5-6A (12.80 g, 34.55 mmol) was dried by azeotropic distillation on a rotary evaporator with pyridine (100 mL) and toluene (100 mL*2). To a solution of compound 7-5-6A (12.80 g, 34.55 mmol) and DMTCl (1.89 g, 5.59 mmol) in the mixture of pyridine (120.00 mL) and THE (400.00 mL) was degassed and purged with N2 for 3 times and then AgNO₃ (10.09 g, 59.43 mmol) was added. The mixture was stirred at 25° C. for 1.5 hr. TLC showed the starting material was consumed. MeOH (5 mL) was added and stirred for 15 min and then the mixture was filtered and the cake was washed with toluene (300 mL*3). The filtrate was concentrated to get the compound 7-7-7A as a yellow oil (46.50 g, crude). The mixture was used directly to next step without any purification. TLC (Petroleum ether/Ethyl acetate) Rf=0.63.

### Preparation of 5′-(S)-C-Me-5′-DMT-dT

[chemical structure]

[1709] To a solution of compound 7-5-7A (46.50 g, 69.11 mmol) in THF (460.00 mL) was added TBAF (1 M, 131.31 mL). The mixture was stirred at 2.5° C. for 5 hrs. TLC showed the starting material was consumed. The mixture was concentrated and then sat. NaCl (5% aq., 200 mL) was added and the aqueous phase was extracted with EtOAc (200 mL*3). The combined organic layer was dried over Na₂SO₄, filtered and concentrated to provide the crude product, which was purified by MPLC (Petroleum ether/Ethyl acetate 5:1, 1:1, 1:4, 5% TEA) to provide 5′-(S)-C-Me-5′-DMT-dT as a white solid (29.0 g, 75.12% yield). ¹H NMR (400 MHz, DMSO-d6): δ=11.35 (s, 1H), 7.56 (s, 1H), 7.58-7.53 (m, 1H), 7.44 (d, J=7.8 Hz, 2H), 7.37-7.24 (m. 6H), 7.23-7.17 (m, 1H), 6.87 (t, J=8.3 Hz, 4H). 6.13 (t, J=5.9 Hz, 1H), 5.21 (d, J=4.9 Hz, 1H), 4.23 (br s, 1H), 3.73 (d, J=0.9 Hz, 6H), 3.67 (t, J=3.7 Hz, 1H), 3.57-3.46 (m, 1H), 2.23-2.04 (m, 2H), 1.67 (s, 3H), 1.70-1.65 (m, 1H), 0.71 (d, J=0.2 Hz, 3H). ¹³CNMR (1.01 MHz, DMSO-d6): δ=170.78, 164.16, 158.64, 158.59, 150.86, 146.71, 137.00, 136.75, 135.97, 130.65, 130.52, 128.38, 128.07, 127.11, 113.48, 110.11, 89.78, 86.41, 83.87, 70.58, 70.22, 60.21, 55.48, 21.20, 18.08, 14.53, 12.54. HPLC: HPLC purity: 98.4%. LCMS: (M−H+)=557.2; LCMS purity: 99.0%. SFC: SFC purity: 99.4%. TLC (Petroleum ether/Ethyl acetate=1:1, 5% TEA) Rf=1.01.

### Preparation of 5′-(S)-C-Me-5′-DMT-dT-CNE-amidite

[chemical structure]

[1711] To a solution of 5′-(S)-C-Me-5′-DMT-dT (5.00 g, 8.95 mmol) in MeCN (50.00 mL) was added 5-ethylsulfanyl-2H-tetrazole (1.17 g, 8.95 mmol), 1-methylimidazole (1.47 g, 17.90 mmol, 1.43 mL) and compound 7-5-1 (4.05 g, 13.43 mmol, 4.26 mL). The reaction mixture was stirred at 20° C. under N2 for 2 hrs. TLC and LC-MS showed some starting material was consumed and the desired substance was formed. The reaction mixture was concentrated under reduced pressure, and the residue was diluted with EtOAc (20 mL). The reaction mixture was washed with aq. saturated NaHCO₃ solution (20 mL), dried over Na₂SO₄, filtered and concentrated to provide the crude product, which was purified by MPLC (Petroleum ether 5% TEA:Ethyl acetate from 10:1 to 1:1) to provide 5′-(S)-C-Me-5′-DMT-dT-CNE-amidite as a white solid (4.3 g, 63.31% yield). ¹H NMR (400 MHz, CHLOROFORM-d) δ=8.19 (br s, 1H), 7.69-7.60 (m, 1H), 7.54 (s, 1H), 7.43-7.33 (m, 2H), 7.32-7.07 (m, 8H), 6.73 (ddd, J=3.7, 5.8, 9.0 Hz, 4H), 6.27-6.15 (m, 1H), 4.49-4.37 (m, 1H), 3.82-3.65 (m. 8H), 3.63-3.55 (m, 2H). 3.53-3.39 (m, 3H), 2.50 (t, J=0.3 Hz, 1H), 2.46-2.31 (m, 1H), 2.29-2.19 (m, 1H), 2.16-2.04 (m, 1H), 1.68 (s, 3H), 1.20-1.00 (m, 13H), 0.95 (d, J:=6.8 Hz, 3H), 0.92-0.74 (m, 411). 3′P NMR (162 MHz, CHLOROFORM-d) δ=149.11 (s, 1P), 148.99 (s, 1P).

### Example 7-6. Synthesis of L-DPSE-5′-(R)-C-Me-5-DMT-dT amidite

[chemical structure]

[1713] The 5′-(R)-C-Me-5′-OMT-dT (11.17 g, 20 mmol) was dried two times by co-evaporation with 80 mL of anhydrous toluene at 45° C. and kept at high vacuum for overnight. Then the dried 5′-(R)-C-Me-5′-OMT-dT was dissolved in dry THF (80 mL) in 500 mL three neck flasks under argon, followed by the addition of triethylamine (13.93 mL, 100 mmol) and the mixture was cooled to −40° C. To this cooled reaction mixture was added the solution of the crude L-DPSE-NOPCl (30 mmol, 1.4 eq, in THF 40 mL), from a stock through syringe dropwise (˜15 min, maintaining the internal temperature −40- to −35° C.). The mixture was then gradually warmed to 5° C. After 30 min at 5° C., TLC and LC-MS analysis indicated the complete conversion of SM to product (total reaction time 2 h). The reaction mixture was cooled in an ice bath and the reaction quenched by addition of water (0.36 mL, 20 mmol). The mixture was stirred for 10 min followed by addition of anhydrous Mg₂SO₄ (3.0 g, 20 mmol). The reaction was filtered through Airfree, Schlenk filter tube, washed with dry THF (60 mL) and the solvent was evaporated under rotary evaporation at 28° C. to afford the crude product as a off-white solid which was dried under high vacuum for overnight. The dried crude product was purified by Combi-Flash Rf (TeledyneISCO) using a 220 silica column (which was pre-deactivated with 3 column volume of ethyl acetate with 5% TEA) with ethyl acetate/hexane mixture contains 5% TEA as a solvent. Fractions were analyzed by TLC and LC-MS and pooled together. Solvent was evaporated in a rotary evaporator at 28° C. and the residue was dried under high vacuum to afford the product as a white solid. Yield: 16.3 g (91%). ¹H NMR (400 MHz, Chloroform-d) S 7.50-7.36 (m, 6H), 7.35-7.06 (m, 13H), 6.85 (d, J=1.4 Hz, 1H), 6.73 (dq, J=8.7, 3.2 Hz, 4H), 6.13 (dd, J=9.3, 5.3 Hz, 1H), 5.10 (td, J=7.8, 7.1, 3.4 Hz, 1H), 4.80 (dt, J=8.6, 5.8 Hz, 1H), 4.04 (q, J=7.1 Hz, 1H), 3.69 (d, J=2.3 Hz, 6H), 3.57-3.36 (m, 3H), 3.29-3.05 (m, 2H), 2.05 (dd, J=13.6, 5.5 Hz, 1H), 1.96 (s, 2H), 1.73-1.50 (m, 3H), 1.47-1.32 (m, 2H), 1.30 (d, J=1.2 Hz, 3H), 1.17 (t, J=7.2 Hz, 2H), 0.75 (d, J=6.5 Hz, 3H), 0.60 (s, 3H). ³¹P NMR (162 MHz, CDCl₃) δ 151.34 (s). MS: LCMS: Calculated, C51H56N3O8PSi, 897.3574; Observed+Ve mode: m/z: 898.52 [M+H]; 999.95 [M+Et3N]. ¹³C NMR (101 MHz, CDCl₃) δ 171.12, 163.83, 158.65, 158.61, 150.21, 146.50, 136.96, 136.71, 136.59, 135.94, 135.54, 134.60, 134.34, 130.24, 130.15, 129.45, 129.39, 128.02, 127.96, 127.94, 127.88, 127.79, 126.86, 113.17, 113.11, 110.93, 89.27, 89.25, 86.48, 83.68, 79.09, 78.99, 77.42, 77.30, 77.10, 76.78, 71.78, 7.1.70, 70.26, 68.39, 68.36, 60.39, 55.24, 47.19, 46.83, 46.09, 39.48, 39.44, 27.35, 25.97, 25.93, 21.05, 18.33, 17.85, 17.81, 14.23, 11.73, 11.45.

### Example 7-7. Synthesis of L-DPSE-5′-(S)-C-Me-5′-DMT-dT amidite

[chemical structure]

[1715] 5′-(S)-C-Me-5′-OMT-dT (1.20 g, 2 mmol) was dried two times by co-evaporation with 20 mL of anhydrous toluene at 45° C. and kept at high vacuum for overnight. Then the dried 5′-(S)-C-Me-5′-OMT-dT was dissolved in dry THF (20 mL) in a 100 mL three neck flasks under argon, followed by the addition of triethylamine (1.4 mL, 10 mmol) and the mixture was cooled to −40° C. To this cooled reaction mixture was added the solution of the crude L-DPSE-NOPCl (3 mmol. 1.5 eq, in THF 3.0 mL) from a stock was through syringe dropwise ˜5 min (maintaining the internal temperature −40° C., then gradually warmed to 5° C.). After 30 min at 5° C., TLC and LC-MS analysis indicated complete conversion of SM to product (total reaction time 1.5 h). The reaction mixture was cooled in an ice bath and the reaction was quenched by addition of water (0.036 mL, 2 mmol). The mixture was stirred for 10 min, followed by addition of anhydrous MgSO₄ (0.3 g, 2 mmol). The reaction was filtered through Airfree, Schlenk filtertube and washed with dry THF (20 mL). The solvent was evaporated under rotary evaporation at 28° C. to provide the off-white solid which was dried under high vacuum for overnight. The dried crude product was purified by Combi-Flash Rf. (Teledyne ISCO) using 40 g silica column (which was pre-deactivated with 3 column volume of ethyl acetate with 5% TEA) with ethyl acetate/hexane mixture containing 5% TEA as a solvent. After column purification, fractions were analyzed by TLC and LC-MS and were pooled together and evaporated in a rotary evaporator at 28° C. The residue was dried under high vacuum to afford L-DPSE 5′-(S)-C-Me-5′-DMT-dT amidite as a white solid. Yield: 1.27 g (70%). ³¹P NMR (162 MHz, CDCl₃) δ 149.73 (s). MS: LC-MS; Calculated: C51H56N3O8PSi, 897.3574; Observed+Ve mode: in/z: 898.56[M+H].

### Example 7-8. Synthesis of L-DPSE-5′-DMT-5-C6-Aminolinker Amidite—Incorporation of Desired Moieties Through Nucleobases

[chemical structure]

[1717] The 5′-DMT-5-C6 aminoTFA-dT (25 g, 31.5 mmol, from Berry & Associates Inc) was dried two times by co-evaporation with 100 mL of anhydrous toluene at 45° C. and kept at high vacuum for overnight. Then the dried material was dissolved in dry THF (100 mL) in 500 mL three neck flasks under argon, followed by the addition of triethylamine (21.92 mL, 157 mmol) and then was cooled to −70° C. To this cooled reaction mixture was added a solution of the crude L-DPSE NOPCl (44 mmol, 1.4 eq, in THF 44 mL), from a stock via syringe dropwise (˜15 min. maintaining the internal temperature −60- to 50° C.). The mixture was gradually warmed to 5° C. After 30 min at 5° C., TLC and LC-MS analysis indicated complete conversion of SM to product (total reaction time 2 h). The reaction mixture was cooled in an ice bath and quenched by addition of water (0.56 mL, 31.5 mmol), and stirred for 10 min followed by added anhydrous Mg₂SO₄ (3.8 g, 31.5 mmol). The reaction was filtered through Airfree, Schlenk filter tube, washed with dry THF (80 mL), and evaporated under rotary evaporation at 28° C. to afford the crude product as off-white solid, which was dried under high vacuum for overnight. The dried crude product was purified by Combi-Flash Rf (Teledyne ISCO) using 220 silica column (which was pre-deactivated with 3 column volume of ethyl acetate with 5% TEA) with ethyl acetate/hexane mixture contains 5% TEA as a solvent. After column purification fractions were analyzed by TLC and LC-MS, and pooled together. Solvent was evaporated in a rotary evaporator at 28° C. and the residue was dried under high vacuum to afford the product as a white solid. Yield: 30 g (88%). MS: LC-MS; Calculated: C60H67F3N5O10PSi, 1133.4347; Observed in +Ve mode: 1235.55 (M+Et3N). ¹H NMR (400 MHz, Chloroform-d) δ 7.78 (s, 1H), 7.40 (ddd, J=9.8, 6.5, 2.2 Hz, 5H), 7.32 (d, J=7.3 Hz, 2H), 7.30-7.09 (m, 15H), 6.99 (d, J=15.5 Hz, 1H), 6.76 (dd, J=8.9, 2.7 Hz, 4H), 6.54 (d, J=15.5 Hz, 1H), 5.12 (t, J=6.1 Hz, 1H), 4.66-4.49 (m, 2H), 4.04 (q, J=7.1 Hz, 1H), 3.8.1 (q, J=3.0 Hz, 1H), 3.67 (s, 611), 3.4.1 (ddt, J=14.8, 10.2, 7.7 Hz, 1H), 3.30-3.13 (m, 4H), 3.12-2.91 (m, 4H), 1.96 (s, 2H), 1.92-1.69 (m, 2H), 1.58 (ddt, J=15.1, 11.6, 8.0 Hz, 1H), 1.50-1.29 (m, 5H), 1.18 (tq, J=15.8, 8.8, 8.0 Hz, 9H), 0.52 (s, 3H). ³¹P NMR (162 MHz, CDCl₃) 5150.88 (s). ¹³C NMR (101 MHz, CDCl₃) δ 171.18, 165.77, 161.89, 158.76, 158.74, 157.85, 157.49, 157.12, 156.76, 149.17, 144.52, 139.69, 136.68, 135.86, 135.53, 135.44, 134.54, 134.30, 131.15, 129.97, 129.89, 129.44, 129.38, 128.09, 127.93, 127.91, 127.18, 122.36, 120.31, 117.44, 114.58, 113.42, 113.39, 111.72, 110.53, 86.65, 86.04, 86.02, 85.67, 79.28, 79.19, 77.42, 77.31, 77.11, 76.79, 73.20, 73.12, 68.05, 68.02, 63.09, 60.41, 55.27, 46.96, 46.60, 45.81, 40.48, 39.56, 38.88, 29.33, 28.52, 27.23, 25.83, 21.04, 17.55, 17.52, 14.20.

### Example 7-9. Synthesis of 5-Alkynyl thioacetate-5′-DMT-3′CNE-2′OMe-U amidite

[chemical structure]

[1719] Compound 7-9-1 (5.0 g, 6.72 mmol) was co-evaporated with anhydrous toluene two times (40 mL×2) and dried under high vacuum for overnight. The dried yellow solid was dissolved in anhydrous THE (14 ml, ˜0.5 mmol/mL) under argon and to the solution was added 5-ethylthio-1H-tetrazole (1.05 g, 8.07 mmol), N-methylimidazole (0.045 g, 0.044 mL, 0.67 mmol) followed by 2-cyanoethyl N,N,N′,N′-tetraisopropylphosphordiamidite (2.23 g, 2.34 mL, 7.39 mmol). The reaction mixture was stirred at room temperature under argon for 5 h. TLC (solvent system: 40% CH₃CN/EtOAC/5% TEA) which was pre-equilibrated with the above solvent system indicated the completion of reaction at 5 h, which was also confirmed with LC-MS. The reaction mixture was diluted with EtOAc (100 mL) and the solution was transferred to separating funnel, washed with aq. saturated. NaHCO₃ solution (40 mL) and dried over anhydrous Mg₂SO₄. The dried solution was evaporated under rotary evaporation at bath temperature 28° C. to afford the crude product as off-yellow solid which was further dried under high vacuum for overnight. The dried crude product was purified in Combi-Flash Rf (Teledyne ISCO) using 80 g flash silica column, which was pre-deactivated with 2 column volume (CV 125 mL, 60 mL/min), of ethyl acetate with 5% TEA, followed by equilibration with 20% EtOAc/Hexane for 2 column volume. The compound was purified using Hexane/EtEOAc/CH₃CN mixture containing 5% TEA as a solvent system. After purification column fractions were analyzed by TLC and LC-MS. Desired fractions were pooled together and evaporated in a rotary evaporator at 28° C. and was dried under high vacuum afforded 7-9-2-CNE amidite as white solid. Yield: 4.8 g (76%). MS: LC-MS; Calculated: C48H58N5O11PS, 943.35; Observed in +Ve mode: m/z 1045.92 (M+Et3N). ¹H NMR (400 MHz, Chloroform-d) δ 8.36-8.07 (m, 1H), 7.47-7.09 (m, 10H), 6.78 (dt, J=9.1, 3.8 Hz, 4H), 5.87 (dd, J=26.6, 3.1 Hz, 1H), 4.73 (d, J=14.9 Hz, 1H), 4.57-4.30 (m, 1H), 4.21-4.00 (m, 2H), 3.86-3.32 (m. 17H), 3.23 (ddd, J=13.0, 11.2, 2.5 Hz, 1H), 2.91 (td, J=7.0, 2.4 Hz, 2H), 2.54 (q, J=6.1 Hz, 1H), 2.27 (d, J=24.2 Hz, 4H), 1.96 (d, J=7.1 Hz, 3H), 1.21-0.82 (m, 14H). ³¹P NMR (162 MHz, CDCl₃) δ 150.60 (s), 150.24(s). ¹³C NMR (101 MHz, CDCl₃) δ 195.80, 169.61, 161.45, 158.70, 158.68, 149.06, 144.75, 144.61, 142.82, 135.67, 135.58, 135.48, 135.38, 130.18, 130.16, 130.12, 128.14, 128.11, 128.09, 128.02, 127.01, 117.69, 117.53, 113.42, 113.38, 113.34, 99.60, 99.33, 88.98, 88.95, 88.50, 88.06, 87.06, 86.85, 83.89, 82.99, 82.62, 77.34, 77.22, 77.02, 76.70, 74.55, 74.40, 69.74, 69.62, 62.04, 61.26, 60.38, 58.97, 58.59, 58.47, 58.45, 57.89, 57.68, 55.34, 55.31, 43.33, 43.21, 35.44, 35.41, 30.54, 29.95, 24.71, 24.65, 24.63, 24.58, 24.56, 24.49, 21.04, 20.50, 20.43, 20.38, 20.31, 14.20.

[1720] As readily appreciated by those skilled in the art, compound 7-9-2 can be utilized in oligonucleotide synthesis as a phosphoramidite in accordance with the present disclosure, thereby incorporating a protected thiol group into oligonucleotides. After deprotection, free thiol groups can be utilized to link oligonucleotide monomers to form multimers, by forming one or more disulfide bonds, in accordance with the present disclosure.

[1721] As appreciated by a person having ordinary skill in the art, many technologies (e.g., chemistry, reagents, linkers, methods, etc.) can be utilized to prepare oligonucleotides (including those with various 5′-end structures) and to incorporate various chemical moieties, e.g., carbohydrate moieties, lipid moieties, targeting moieties, etc., into oligonucleotides in accordance with the present disclosure, for example but not limited to those described in WO/2010/064146, WO/2011/005761, WO/2013/012758, WO/2014/010250, US2013/0178612, WO/2014/012081, WO/2015/107425, WO/2017/015555, and WO/2017/062862. Described herein are example technologies for preparing oligonucleotides, including those comprising various moieties.

[1722] As shown in Tables 61 to 73, various oligonucleotides were constructed and tested for their ability to mediate knockdown of PNPLA3, including in vitro. Without wishing to be bound by any theory, the present disclosure suggests that at least some of the oligonucleotides in Tables 61 to 73 may be capable of mediating knockdown via a RISC-mediated ssRNAi mechanism. In addition, some of the oligonucleotides in these tables have a hybrid format. In addition, at least some of the oligonucleotides described herein are capable of mediating knockdown of PNPLA3 in an allele-specific manner.

[1723] Table 61. Table 61 shows in vitro efficacy of different single-stranded RNAi agents, which target PNPLA3. Oligonucleotides tested are: WV-4054 and WV-4098. Oligonucleotides were tested in Hep3B (1/1) cells, with is homozygous wild-type (1/I aa in PNPLA3); and in Huh7 cells, which is homozygous mutant (M/M aa in PNPLA3). 1050 of WV-4054 in Huh7 cells was 0.239 nM; and 1050 of WV-4098 in Huh7 cells was 0.158 nM. Oligonucleotides WV-4054 and WV-4098 differ in length but are both capable of mediating allele-specific knockdown of PNPLA3. The ability of WV-4098 to mediate knockdown via a RNA interference mechanism is supported by the finding that a CRISPR knockout of AGO-2 (which is required for RNA interference) prevented the ability of WV-4098 to knockdown gene expression, while knockouts of AGO-1, AGO-3 and AGO-4 (which are not required for RNA interference) did not (data not shown).

TABLE 61A
Activity of oligonucleotides.

| Conc. (exp 10) (nM) | WV-4054-Hep3b | | WV-4054-Huh7 | |
|---|---|---|---|---|
| 0.796 | 1.226 | 1.121 | 0.280 | 0.449 |
| 0.495 | 0.910 | 1.010 | 0.478 | 0.402 |
| 0.194 | 1.068 | 1.024 | 0.419 | 0.367 |
| −0.107 | 0.843 | 1.160 | 0.405 | 0.449 |
| −0.408 | 0.976 | 0.942 | 0.422 | 0.584 |
| −0.709 | 0.798 | 0.917 | 0.750 | 0.601 |
| −1.010 | 0.832 | 1.038 | 0.798 | 0.755 |
| −1.612 | 1.053 | 0.923 | 0.969 | 0.792 |
| −2.214 | 0.956 | 0.929 | 0.809 | 0.798 |

[1724] Table 62. Table 62 shows the in vitro potency and IC₅₀ for different single-stranded RNAi agents, which target PNPLA3. Tested oligonucleotides are: WV-2477 (positive control), WV-3380 (positive control), WV-4018, WV-4019, WV-4020, WV-4021, WV-4022, WV-4023, WV-4024, and WV-4025, each tested in Hep3B (Hep) and Huh7 (Huh) cells. Oligonucleotides for PNPLA3 assays were delivered using Lipofectamine® 2000 transfection reagent (ThermoFisher, Grand Island, NY). In this and other tables, oligonucleotides were tested at concentrations of 2, 8.25 and 33 nM.

TABLE 62
Activity of oligonucleotides.

| | 2 nM | | 8.25 nM | | 33 nM | |
|---|---|---|---|---|---|---|
| Control | | 94.6 | 103.5 | 102.8 | 102.1 | 108.7 |
| WV-2477-Hep | | 91.4 | 110.2 | 103.5 | 101.4 | 102.1 |
| WV-2477 Huh | | 86.2 | 90.5 | 96.4 | 84.5 | 98.4 |
| WV-3380-Hep | 51.1 | 46.3 | 30.8 | 26.4 | 4.9 | 8.8 |
| WV-3380-Huh | | 59.7 | 53.5 | 58.9 | 10.3 | |
| WV-4018-Hep | 61.1 | 47.0 | | 94.0 | 72.7 | 65.5 |
| WV-4018-Huh | 43.4 | 46.9 | 61.8 | 51.6 | 63.6 | 66.7 |
| WV-4019-Hep | 75.3 | 88.3 | 117.3 | 119.7 | 84.7 | 79.6 |
| WV-4019-Huh | 67.7 | 68.1 | 77.7 | 77.2 | 67.7 | 74.0 |
| WV-4020-Hep | 74.7 | 68.8 | 87.1 | 92.7 | 52.1 | 59.5 |
| WV-4020-Huh | 70.0 | 81.6 | 71.0 | 91.2 | 54.6 | 77.2 |
| WV-4021-Hep | 64.6 | 81.2 | 76.8 | 85.9 | 45.4 | 56.6 |
| WV-4021-Huh | 68.6 | 64.0 | 69.1 | 69.6 | 64.0 | 68.1 |
| WV-4022-Hep | 66.0 | 75.3 | | 97.3 | 56.3 | 62.9 |
| WV-4022-Huh | 49.5 | 62.7 | 63.6 | 58.9 | 58.1 | 77.2 |
| WV-4023-Hep | 62.9 | 90.8 | 76.3 | 79.6 | 46.7 | 47.6 |
| WV-4023-Huh | 70.5 | 66.7 | 71.5 | 75.1 | 64.0 | 67.7 |
| WV-4024-Hep | 74.7 | 77.4 | 99.3 | 100.7 | 54.7 | 75.8 |
| WV-4024-Huh | 70.0 | 63.1 | 104.0 | 91.2 | 79.9 | 88.7 |
| WV-4025-Hep | 61.1 | 65.5 | 65.5 | | 83.5 | 55.1 |
| WV-4025-Huh | 58.9 | 71.5 | 69.1 | 66.3 | 79.9 | 63.6 |

[1725] Table 63. Table 63 shows the in vitro potency and IC₅₀ for different single-stranded RNAi agents, which target PNPLA3. Tested oligonucleotides are: WV-2477 (positive control), WV-3380 (positive control), WV-4026, WV-4027, WV-4028, WV-4029, WV-4030, WV-4031, WV-4032, and WV-4033, each tested in Hep3B (Hep) and Huh7 (Huh) cells.

TABLE 63
Activity of oligonucleotides.

| | 2 nM | | 8.25 nM | | 33 nM | |
|---|---|---|---|---|---|---|
| Control | | 94.6 | 103.5 | 102.8 | 102.1 | 108.7 |
| WV-2477-Hep | | 91.4 | 110.2 | 103.5 | 101.4 | 102.1 |
| WV-2477 Huh | | 86.2 | 90.5 | 96.4 | 84.5 | 98.4 |
| WV-3380-Hep | 51.1 | 46.3 | 30.8 | 26.4 | 4.9 | 8.8 |
| WV-3380-Huh | | 59.7 | 53.5 | 58.9 | 10.3 | |
| WV-4026-Hep | | 104.2 | 115.7 | 105.7 | 103.5 | 86.5 |
| WV-4026-Huh | 74.0 | 76.1 | 84.5 | 70.5 | 71.5 | 68.1 |
| WV-4027-Hep | 64.6 | 76.3 | 71.2 | 77.4 | 39.0 | 51.1 |
| WV-4027-Huh | 69.1 | 75.1 | 55.7 | 69.1 | 60.1 | 61.4 |
| WV-4028-Hep | 79.0 | 71.2 | 102.8 | 107.2 | 70.2 | 53.6 |
| WV-4028-Huh | 74.0 | 70.0 | 64.5 | 65.4 | 83.9 | 76.7 |
| WV-4029-Hep | 79.6 | 87.7 | 81.8 | 100.0 | 57.8 | 79.6 |
| WV-4029-Huh | | 74.0 | 74.6 | 79.4 | 116.2 | 102.6 |
| WV-4030-Hep | | 85.9 | 93.3 | 105.0 | 68.8 | 80.1 |
| WV-4030-Huh | 51.6 | 67.7 | 75.1 | 69.1 | 71.5 | |
| WV-4031-Hep | 85.9 | 101.4 | 104.2 | 122.3 | 51.1 | 56.3 |
| WV-4031-Huh | 73.5 | 72.0 | 100.4 | 91.2 | 95.7 | 95.0 |
| WV-4032-Hep | 78.5 | 73.7 | | 121.4 | 51.8 | 62.0 |
| WV-4032-Huh | 81.0 | 82.2 | 100.4 | 105.4 | 107.7 | 124.5 |
| WV-4033-Hep | 84.1 | 85.3 | 100.0 | | 83.5 | 83.5 |
| WV-4033-Huh | 52.4 | 38.9 | 57.3 | 59.7 | 107.7 | 81.0 |

[1726] Table 64. Table 64 shows the in vitro potency and IC₅₀ for different single-stranded RNAi agents, which target PNPLA3. Tested oligonucleotides are: WV-2477 (positive control), WV-3380 (positive control), WV-4034, WV-4035, WV-4036, WV-4037, WV-4038, WV-4039, WV-4040, WV-4041, each tested in Hep3B (Hep) and Huh7 (Huh) cells.

TABLE 64
Activity of oligonucleotides.

| | 2 n M | | 8.25 nM | | 33 nM | |
|---|---|---|---|---|---|---|
| Control | | 94.6 | 103.5 | 102.8 | 102.1 | 108.7 |
| WV-2477-Hep | | 91.4 | 110.2 | 103.5 | 101.4 | 102.1 |
| WV-2477 Huh | | 86.2 | 90.5 | 96.4 | 84.5 | 98.4 |
| WV-3380-Hep | 51.1 | 46.3 | 30.8 | 26.4 | 4.9 | 8.8 |
| WV-3380-Huh | | 59.7 | 53.5 | 58.9 | 10.3 | |
| WV-4034-Hep | 100.0 | 100.0 | 100.0 | 100.0 | 100.0 | 100.0 |
| WV-4034-Huh | 73.0 | 76.7 | 91.2 | 78.8 | 101.1 | 119.4 |
| WV-4035-Hep | 81.8 | 77.4 | 92.7 | 104.2 | 57.8 | 84.7 |
| WV-4035-Huh | 75.1 | 81.6 | 82.2 | 63.1 | 101.1 | 115.4 |
| WV-4036-Hep | 76.3 | 77.4 | 82.9 | 77.4 | 49.7 | 54.0 |
| WV-4036-Huh | 74.6 | 75.1 | 72.5 | 67.2 | 75.6 | 87.4 |
| WV-4037-Hep | 79.6 | 68.3 | 75.8 | 97.3 | 80.7 | 72.7 |
| WV-4037-Huh | 69.6 | 82.7 | 76.7 | 87.4 | 94.4 | 81.0 |
| WV-4038-Hep | 64.2 | 71.2 | 74.2 | 97.9 | 83.5 | 83.5 |
| WV-4038-Huh | 69.1 | 85.1 | 78.3 | 67.2 | 86.8 | 69.6 |
| WV-4039-Hep | 69.3 | 70.2 | 46.0 | 77.9 | 48.6 | 45.7 |
| WV-4039-Huh | 63.1 | 79.9 | 64.0 | 58.9 | 61.0 | 50.6 |
| WV-4040-Hep | 74.2 | 67.8 | 92.7 | 75.8 | 50.0 | 59.9 |
| WV-4040-Huh | 88.0 | 70.0 | 73.5 | 78.3 | 71.0 | 66.3 |
| WV-4041-Hep | 77.4 | 75.8 | 82.9 | 95.9 | 61.1 | 60.7 |
| WV-4041-Huh | 99.1 | 93.7 | 83.9 | 82.7 | 67.2 | 61.0 |

[1727] Table 65. Table 65 shows the in vitro potency and IC₅₀ for different single-stranded RNAi agents, which target PNPLA3. Tested oligonucleotides are: WV-3380 (positive control), WV-2477 (positive control), WV-4042, WV-4043, WV-4044, WV-4045, WV-4046, WV-4047, WV-4048, and WV-4049, each tested in Hep3B (Hep) and Huh7 (Huh) cells.

TABLE 65
Activity of oligonucleotides.

| | 2 nM | | 8.25 nM | | 33 nM | |
|---|---|---|---|---|---|---|
| Control | 111.9 | 113.4 | 113.4 | 119.1 | 100.1 | 111.9 |
| WV-2477-Hep | 99.4 | 100.1 | 115.8 | 107.3 | 103.7 | 119.1 |
| WV-2477-Huh | 96.9 | 91.6 | 89.7 | 109.7 | 96.9 | 91.0 |
| WV-3380-Hep | 39.8 | 52.6 | 35.7 | 26.3 | 5.9 | |
| WV-3380-Huh | 54.5 | 60.5 | | 46.8 | 22.7 | |
| WV-4042-Hep | 63.8 | 67.5 | 86.6 | 72.8 | 49.0 | 49.4 |
| WV-4042-Huh | | 66.2 | | 48.4 | 25.4 | 28.2 |
| WV-4043-Hep | 64.3 | 60.8 | 83.6 | 68.4 | 52.9 | 41.8 |
| WV-4043-Huh | 48.4 | 64.8 | 48.4 | 56.8 | 47.1 | 52.6 |
| WV-4044-Hep | 70.8 | 66.5 | 83.0 | 73.3 | 20.6 | 33.7 |
| WV-4044-Huh | 86.7 | 109.0 | 72.9 | 81.4 | 38.5 | 33.3 |
| WV-4045-Hep | 86.0 | 80.2 | 100.8 | 103.0 | 44.8 | 42.1 |
| WV-4045-Huh | 81.4 | 79.2 | 80.9 | 76.5 | 45.2 | 62.6 |
| WV-4046-Hep | 117.4 | 96.7 | 92.1 | 82.5 | 24.9 | 22.9 |
| WV-4046-Huh | 83.7 | 73.9 | 71.9 | 56.4 | 44.6 | 41.9 |
| WV-4047-Hep | 86.0 | 76.4 | 98.8 | 111.1 | 53.3 | 51.8 |
| WV-4047-Huh | 63.5 | 94.2 | 78.7 | 71.9 | 56.0 | 38.0 |
| WV-4048-Hep | 79.1 | 70.3 | 95.4 | 98.8 | 37.4 | 27.2 |
| WV-4048-Huh | 93.6 | 76.5 | 81.4 | 81.4 | 46.5 | 44.9 |
| WV-4049-Hep | | 107.3 | 107.3 | 111.9 | 36.1 | 55.9 |
| WV-4049-Huh | 87.3 | 98.2 | 88.5 | 89.7 | 62.6 | 62.2 |

[1728] Table 66. Table 66 shows the in vitro potency and IC₅₀ for different single-stranded RNAi agents, which target PNPLA3. Tested oligonucleotides are: WV-2477 (positive control), WV-3380 (positive control), WV-4050, WV-4051, WV-4052, WV-4053, WV-4054, WV-4055, WV-4056, WV-4057, each tested in Hep3B (Hep) and Huh7 (Huh) cells.

TABLE 66
Activity of oligonucleotides.

| | 2 nM | | 8.25 nM | | 33 nM | |
|---|---|---|---|---|---|---|
| Control | 111.9 | 113.4 | 113.4 | 119.1 | 100.1 | 111.9 |
| WV-2477-Hep | 99.4 | 100.1 | 115.8 | 107.3 | 103.7 | 119.1 |
| WV-2477-Huh | 96.9 | 91.6 | 89.7 | 109.7 | 96.9 | 91.0 |
| WV-3380-Hep | 39.8 | 52.6 | 35.7 | 26.3 | 5.9 | |
| WV-3380-Huh | 54.5 | 60.5 | | 46.8 | 22.7 | |
| WV-4050-Hep | 71.8 | 75.9 | 98.8 | 75.9 | 54.8 | 55.2 |
| WV-4050-Huh | 69.0 | 80.9 | 63.0 | 57.6 | 46.8 | 57.6 |
| WV-4051-Hep | 73.8 | 80.8 | 92.8 | 69.4 | 40.4 | 59.1 |
| WV-4051-Huh | 67.1 | 74.9 | 54.9 | 58.8 | 47.4 | 37.5 |
| WV-4052-Hep | 79.1 | 77.0 | 113.4 | 97.4 | 51.5 | 44.8 |
| WV-4052-Huh | 67.1 | 67.1 | 84.9 | 80.3 | 75.5 | 52.6 |
| WV-4053-Hep | 89.0 | 69.8 | 100.0 | | 63.4 | 57.1 |
| WV-4053-Huh | 56.0 | 64.3 | 76.0 | 68.0 | 84.3 | 59.2 |
| WV-4054-Hep | 100.0 | 100.0 | 100.0 | 100.0 | 106.6 | 111.9 |
| WV-4054-Huh | 30.6 | 31.7 | | 38.8 | 53.0 | 47.8 |
| WV-4055-Hep | 92.1 | 105.8 | 100.0 | | 58.7 | 72.3 |
| WV-4055-Huh | 69.9 | 80.9 | 95.5 | 81.4 | 77.6 | 71.9 |
| WV-4056-Hep | 86.6 | 81.3 | | 116.6 | 54.0 | 65.6 |
| WV-4056-Huh | 84.9 | | 78.7 | 101.0 | 62.2 | 76.5 |
| WV-4057-Hep | 105.8 | 95.4 | 110.3 | 105.1 | 46.1 | 50.8 |
| WV-4057-Huh | 87.9 | 79.8 | 107.5 | 92.3 | 72.9 | 50.5 |

[1729] Table 67. Table 67 shows the in vitro potency and IC₅₀ for different single-stranded RNAi agents, which target PNPLA3. Tested oligonucleotides are: WV-2477 (positive control), WV-3380 (positive control), WV-4058, WV-4059, WV-4060, WV-4061, WV-4062, WV-4063, WV-4064, and WV-4065. Oligonucleotides were tested in Hep3B (Hep) and Huh7 (Huh-7 or Huh or P-Huh7 or P-Huh-7) cells.

TABLE 67
Activity of oligonucleotides.

| | 2 nM | | 8.25 nM | | 33 nM | |
|---|---|---|---|---|---|---|
| Control | 111.9 | 113.4 | 113.4 | 119.1 | 100.1 | 111.9 |
| WV-2477-Hep | 99.4 | 100.1 | 115.8 | 107.3 | 103.7 | 119.1 |
| WV-2477-Huh | 96.9 | 91.6 | 89.7 | 109.7 | 96.9 | 91.0 |
| WV-3380-Hep | 39.8 | 52.6 | 35.7 | 26.3 | 5.9 | |
| WV-3380-Huh | 54.5 | 60.5 | | 46.8 | 22.7 | |
| WV-4058-Hep | 67.0 | 78.0 | 73.3 | 62.5 | 67.0 | 56.3 |
| WV-4058-Huh | 73.9 | 79.8 | 86.7 | 70.9 | 55.6 | 59.6 |
| WV-4059-Hep | 64.7 | 70.3 | 74.8 | 53.7 | 74.3 | 63.4 |
| WV-4059-Huh | 74.4 | 63.0 | 65.7 | 74.4 | 44.3 | 43.9 |
| WV-4060-Hep | 80.8 | 68.9 | | 107.3 | 43.0 | 63.4 |
| WV-4060-Huh | 77.6 | 39.9 | 72.9 | 66.2 | 66.6 | 79.2 |
| WV-4061-Hep | 115.8 | 93.4 | | 108.8 | 57.5 | 66.1 |
| WV-4061-Huh | 70.9 | 60.0 | 87.9 | 68.0 | 61.7 | 70.4 |
| WV-4062-Hep | 97.4 | 91.5 | 111.9 | | 78.0 | 59.5 |
| WV-4062-Huh | | 81.4 | 94.2 | 83.2 | 101.7 | 82.6 |
| WV-4063-Hep | 86.6 | 82.5 | 98.1 | 119.9 | 47.0 | 54.0 |
| WV-4063-Huh | | 79.2 | 76.5 | 77.6 | 58.8 | 75.5 |
| WV-4064-Hep | 72.8 | 83.6 | 111.1 | 91.5 | 61.2 | 56.3 |
| WV-4064-Huh | 71.4 | 59.2 | 53.4 | 52.6 | 50.1 | 66.2 |
| WV-4065-Hep | 109.6 | 107.3 | 87.2 | 101.5 | 33.7 | 68.4 |
| WV-4065-Huh | 92.3 | 86.1 | 89.1 | 97.5 | 67.1 | 76.0 |

[1730] Table 68. Table 68 shows the in vitro potency for different single-stranded RNAi agents, which target PNPLA3. Tested oligonucleotides are: WV-4098, WV-7462, WV-7464, WV-7467, and WV-7469.

TABLE 68
Activity of oligonucleotides.
Part 1. Activity in Hep3B cells.

| Conc. | WV-4098 | | WV-7462 | | WV-7464 | |
|---|---|---|---|---|---|---|
| 0.006 | 97.9 | 94.5 | 112.3 | 100.9 | 106.4 | 107.3 |
| 0.025 | 134.1 | 100.9 | 96.2 | 87.9 | 155.5 | 99.2 |
| 0.01 | 99.5 | 97.9 | 92.5 | 95.0 | 108.9 | 109.4 |
| 0.4 | 84.4 | 94.2 | 74.2 | 90.5 | 96.5 | 105.6 |
| 1.6 | 88.3 | 84.4 | 99.6 | 82.4 | 80.8 | 97.0 |
| 6.25 | 131.4 | 137.0 | 120.3 | 142.1 | 81.2 | 121.1 |

| Conc. | WV-7467 | | WV-7469 | |
|---|---|---|---|---|
| 0.006 | 103.9 | 105.9 | 93.9 | 100.7 |
| 0.025 | 99.9 | 108.8 | 97.4 | 84.9 |
| 0.01 | 91.0 | 106.0 | 90.8 | 107.1 |
| 0.4 | 100.5 | 100.1 | 75.8 | 81.1 |
| 1.6 | 83.8 | 82.0 | 76.0 | 72.5 |
| 6.25 | 100.0 | 100.3 | 77.0 | 82.8 |

Part 2. Activity in Huh7 (P-Huh7) cells.

| Conc. | WV-4098 | | WV-7462 | | WV-7464 | |
|---|---|---|---|---|---|---|
| 0.006 | 105.8 | 115.7 | 129.8 | 116.1 | 110.5 | 131.0 |
| 0.025 | 102.1 | 105.0 | 110.0 | 94.3 | 116.6 | 127.3 |
| 0.01 | 77.2 | 95.8 | 93.3 | 72.8 | 79.1 | 104.5 |
| 0.4 | 83.8 | 65.4 | 66.2 | 66.4 | 93.8 | 54.2 |
| 1.6 | 40.8 | 54.7 | 50.9 | 46.1 | 58.1 | 45.0 |
| 6.25 | 43.0 | 34.2 | 49.8 | 32.9 | 48.9 | 34.3 |

| Conc. | WV-7467 | | WV-7469 | |
|---|---|---|---|---|
| 0.006 | 109.2 | 129.2 | 86.0 | 87.3 |
| 0.025 | 99.9 | 107.2 | 90.5 | 102.1 |
| 0.01 | 73.3 | 63.7 | 72.0 | 65.6 |
| 0.4 | 88.0 | 66.7 | 54.0 | 46.2 |
| 1.6 | 49.1 | 33.4 | 41.2 | 28.6 |
| 6.25 | 48.5 | 38.8 | 32.0 | 28.5 |

Concentration (Conc.) of oligonucleotides is provided. Cells used and oligonucleotide used are also provided. Numbers represent PNPLA3 mRNA level (PNPLA3/HPRT1), wherein 100 would represent 100% mRNA level (no knockdown) and 0 would represent 0% mRNA level (or 100% knockdown). Data from replicates are shown.

[1731] Table 69. Tables 69A and B show the in vitro potency and IC₅₀ for different single-stranded RNAi agents, which target PNPLA3. Tested oligonucleotides are: Table 69A, WV-4098, WV-4075, WV-7465, WV-7466, and WV-7468; and Table 69B, WV-3380, WV-4098, and WV-7469.

TABLE 69A
Activity of oligonucleotides.
Part 1. Activity in Hep3B cells.

| Conc. | WV-4098 | | WV-4075 | | WV-7463 | |
|---|---|---|---|---|---|---|
| 0.006 | 97.9 | 94.5 | 77.4 | 80.1 | 90.8 | 106.9 |
| 0.025 | 134.1 | 100.9 | 91.1 | 109.1 | 119.9 | 97.2 |
| 0.01 | 99.5 | 97.9 | 85.3 | 86.6 | 106.7 | 90.9 |
| 0.4 | 84.4 | 94.2 | 83.1 | 95.5 | 79.4 | 86.3 |
| 1.6 | 88.3 | 84.4 | 110.5 | 112.5 | 127.0 | 112.5 |
| 6.25 | 131.4 | 137.0 | 115.8 | 135.8 | 148.7 | 164.1 |
| Conc. | WV-7465 | | WV-7466 | | WV-7468 | |
| 0.006 | 101.1 | 102.2 | 124.3 | 98.9 | 97.9 | 97.0 |
| 0.025 | 118.5 | 116.3 | 140.4 | 121.2 | 118.1 | 112.1 |
| 0.01 | 102.0 | 110.0 | 126.4 | 113.2 | 100.2 | 88.8 |
| 0.4 | 131.3 | 132.4 | 112.0 | 139.2 | 92.7 | 96.6 |
| 1.6 | 108.2 | 95.5 | 102.5 | 98.1 | 83.9 | 97.7 |
| 6.25 | 98.1 | 107.2 | 126.6 | 128.5 | 120.7 | 134.7 |

Part 2. Activity in Huh 7 cells.

| Conc. | WV-4098 | | WV-4075 | | WV-7463 | |
|---|---|---|---|---|---|---|
| 0.006 | 105.8 | 115.7 | 111.3 | 119.4 | 116.9 | 131.9 |
| 0.025 | 102.1 | 105.0 | 101.8 | 95.8 | 116.9 | 119.4 |
| 0.01 | 77.2 | 95.8 | 96.5 | 94.1 | 95.3 | 77.9 |
| 0.4 | 83.8 | 65.4 | 85.9 | 81.0 | 62.6 | 50.7 |
| 1.6 | 40.8 | 54.7 | 58.6 | 67.8 | 50.1 | 45.6 |
| 6.25 | 43.0 | 34.2 | 70.8 | 57.7 | 60.0 | 67.1 |
| Conc. | WV-7465 | | WV-7466 | | WV-7468 | |
| 0.006 | 119.6 | 126.5 | 100.1 | 124.8 | 69.3 | 95.2 |
| 0.025 | 114.8 | 111.8 | 95.0 | 106.6 | 69.8 | 84.9 |
| 0.01 | 104.9 | 101.4 | 50.1 | 61.3 | 54.2 | 48.5 |
| 0.4 | 84.5 | 64.3 | 64.1 | 43.3 | 55.5 | 38.1 |
| 1.6 | 55.3 | 55.2 | 40.2 | 35.3 | 37.4 | 33.5 |
| 6.25 | 79.4 | 57.3 | 50.2 | 46.5 | 60.3 | 41.4 |

Concentration (Conc.) of oligonucleotides is provided. Cells used and oligonucleotide used are also provided. Numbers represent PNPLA3 mRNA level (PNPLA3/HPRT1), wherein 100 would represent 100% mRNA level (no knockdown) and 0 would represent 0% mRNA level (or 100% knockdown). Data from replicates are shown.

TABLE 69B
Activity of oligonucleotides.

| Conc. | Hep3B-WV3380 | | Huh7-WV-3380 | |
|---|---|---|---|---|
| 0.006 | 83.9 | 88.2 | 87.5 | 101.8 |
| 0.025 | 92.3 | 88.7 | 90.1 | 105.4 |
| 0.01 | 75.3 | 70.6 | 75.5 | |
| 0.4 | 40.2 | 49.4 | 79.1 | 69.3 |
| 1.6 | 22.6 | 20.8 | 52.2 | 52.2 |
| 6.25 | 5.3 | 4.4 | 18.6 | 15.5 |
| Conc. | Hep3B-WV-4098 | | Huh7-WV-4098 | |
| 0.006 | 97.9 | 94.5 | 105.8 | 115.7 |
| 0.025 | 134.1 | 100.9 | 102.1 | 105.0 |
| 0.01 | 99.5 | 97.9 | 77.2 | 95.8 |
| 0.4 | 84.4 | 94.2 | 83.8 | 65.4 |
| 1.6 | 88.3 | 84.4 | 40.8 | 54.7 |
| 6.25 | 131.4 | 137.0 | 43.0 | 34.2 |
| Conc. | Hep3B-WV-7469 | | Huh-WV-7469 | |
| 0.006 | 93.9 | 100.7 | 86.0 | 87.3 |
| 0.025 | 97.4 | 84.9 | 90.5 | 102.1 |
| 0.01 | 90.8 | 107.1 | 72.0 | 65.6 |
| 0.4 | 75.8 | 81.1 | 54.0 | 46.2 |
| 1.6 | 76.0 | 72.5 | 41.2 | 28.6 |
| 6.25 | 77.0 | 82.8 | 32.0 | 28.5 |

Concentration (Conc.) of oligonucleotides is provided. Cells used and oligonucleotide used are also provided. Numbers represent PNPLA3 mRNA level (PNPLA3/HPRT1), wherein 100 would represent 100% mRNA level (no knockdown) and 0 would represent 0% mRNA level (or 100% knockdown). Data from replicates are shown.

[1732] Table 69C shows a rat liver homogenate stability assay (24 hours). Tested oligonucleotides were: WV-4098, WV-7463, WV-7462, WV-7316, WV-4075. WV-7469, WV-7464, WV-7468, WV-7467, WV-7466, WV-7465.

TABLE 69C
Stability of oligonucleotides.

| WV-4075 | | | WV-4098 | | | WV-7316 | | |
|---|---|---|---|---|---|---|---|---|
| 23.5 | 23.5 | 24.3 | 19.2 | 18.3 | 17.4 | 16.8 | 18.7 | 18.3 |
| WV-7462 | | | WV-7463 | | | WV-7464 | | |
| 21.1 | 20.7 | 21.4 | 15.0 | 16.2 | 15.4 | 45.7 | 43.6 | 45.8 |
| WV-7465 | | | WV-7466 | | | WV-7467 | | |
| 85.6 | 86.1 | 87.6 | 65.2 | 69.6 | 69.8 | 54.7 | 57.1 | 56.0 |

| WV-7468 | | | WV-7469 | | |
|---|---|---|---|---|---|
| 55.7 | 55.6 | 50.0 | 43.0 | 45.0 | 41.8 |

Numbers indicate percentage of full-length oligonucleotide remaining after 24 hr treatment with rat liver homogenate. 100 would represent 100% of full length oligonucleotide remaining; 0 would represent 0% of full length oligonucleotide remaining. Different oligonucleotides have different numbers of stereocontrolled phosphorothioate internucleotidic linkages. Data from replicates are shown.

[1733] Table 70. Table 70 shows the IC₅₀ for different single-stranded RNAi agents. Tested oligonucleotides are: WV-2477, WV-4054, and WV-3387 in Huh7 and Hep3B cells. WV-2477 did not significantly knock down PNPLA3 in either cells. WV-4054 has a sequence complementary to a pair of SNPs, rs738408 T and rs738409 G, and is able to mediate allele-specific RNA interference against cells (Huh7) which comprise these two SNPs. This oligonucleotide does not mediate significant RNAi interference at the tested concentrations in different cells (Hep3B) which do not comprise these SNPs, but rather have rs738408C and rs738409 C. In addition, single-stranded RNAi agent WV-4098 is also able to knock-down a complementary sequence (with SNPs rs738408 T and rs738409 G in Huh7 cells), but not a non-complementary sequence (with SNPs rs738408C and rs738409 C in Hep3B cells) at the tested concentrations.

TABLE 70
IC50 of oligonucleotides.

| Oligonucleotide-cell tested | IC50 (nM) | 95% CI |
|---|---|---|
| WV-4054-Hep3b | NA | — |
| WV-4054-Huh7 | 0.239 | 0.15 to 0.38 |
| WV-4098-Hep3b | NA | — |
| WV-4098-Huh7 | 0.158 | 0.10 to 0.22 |

[1734] Table 71. Tables 71A to 71D show non-limiting examples of formats of stereocontrolled (e.g., chirally controlled) oligonucleotides (e.g., single-stranded RNAi agents).

[1735] Table 72. Table 72 shows the in vitro potency in primary cynomolgus hepatic cells of ssRNAi WV-4054.

[1736] Table 74. Table 74 shows the efficacy of antisense oligonucleotides in knockdown of PNPLA3 mediated by RNase H, in a Hep3B 24 hour assay. Tested oligonucleotides are: WV-1868 (negative control), WV-3367, WV-3368, WV-3369, WV-3370, WV-3371, WV-3372, WV-3373, WV-3374, WV-3375, WV-3376, WV-3377, WV-3378, WV-3379, and WV-3380. WV-1868 is an antisense oligonucleotide (operating through RNaseH-mediated knockdown), while other tested oligonucleotides RNAi agents. Cell used were PCH cells.

[1737] Table 73. Table 73 shows the structure of PNPLA3 ssRNAi agents WV-7467, WV-7469. WV-7466, and WV-7468; and ASO WV-6825.

[1738] As shown in Tables 74 to 90, various oligonucleotides were constructed and tested for their ability to mediate knockdown of PNPLA3, including in vitro. Without wishing to be bound by any theory, the present disclosure suggests that at least some of the oligonucleotides in Tables 74 to 90 may be capable of mediating knockdown via a RNaseH-mediated mechanism. In addition, some of the oligonucleotides in these tables have a hybrid format.

[1739] Table 74. Table 74 shows the in vitro potency of ASOs to PNPLA3. Tested oligonucleotides are: WV-1868, and WV-3367 to WV-3380. Cells used were Hep3B cells.

TABLE 74
Activity of oligonucleotides.

| Wave ID | 2.0 nM | 8.2 nM | 33 nM |
|---|---|---|---|
| Control | .96 | 1.08 | 1.13 |
| WV-1868 | 1.18 | 1.06 | .85 |
| WV-3367 | 1.07 | 1.04 | .77 |
| WV-3368 | 1.17 | .96 | .58 |
| WV-3369 | 1.12 | .98 | 1.03 |
| WV-3370 | 1.23 | .88 | .67 |
| WV-3371 | 1.24 | 1.19 | .65 |
| WV-3372 | 1.08 | 1.17 | 1.05 |
| WV-3373 | 1.22 | 1.14 | 1.15 |
| WV-3374 | 1.19 | .99 | .76 |
| WV-3375 | 1.14 | 1.0 | .63 |
| WV-3376 | 1.14 | .72 | .39 |
| WV-3377 | .92 | .52 | .12 |
| WV-3378 | 1.07 | .48 | .15 |
| WV-3379 | 1.18 | .45 | .16 |
| WV-3380 | .31 | .12 | .06 |

Table 75. Table 75 shows the in vitro potency of ASOs to PNPLA3. Tested oligonucleotides are: WV-1868, and WV-3381 to WV-3394.

TABLE 75
Activity of oligonucleotides.

| Wave ID | 2.0 nM | 8.2 nM | 33 nM |
|---|---|---|---|
| Control | .95 | 1.07 | 1.12 |
| WV-1868 | 1.18 | 1.07 | .85 |
| WV-3381 | .48 | .11 | .18 |
| WV-3382 | .99 | .33 | .18 |
| WV-3383 | 1.02 | .55 | .31 |
| WV-3384 | 1.16 | .42 | .13 |
| WV-3385 | 1.03 | .42 | .18 |
| WV-3386 | .57 | .22 | .23 |
| WV-3387 | .23 | .08 | .11 |
| WV-3388 | 1.08 | .95 | 1.03 |
| WV-3389 | 1.07 | 1.15 | .79 |
| WV-3390 | .63 | .25 | .05 |
| WV-3391 | .46 | .18 | .14 |
| WV-3392 | .42 | .13 | .08 |
| WV-3393 | .33 | .11 | .05 |
| WV-3394 | .46 | .20 | .10 |

[1740] Table 76. Tables 76A and B show the in vitro potency of ASOs to PNPLA3. Tested oligonucleotides are: Table 76A, WV-1868, and WV-3395 to WV-3408; Table 76B, WV-1868, and WV-3409 to WV-3422.

TABLE 76A
Activity of oligonucleotides.

| Wave ID | 2.0 nM | 8.2 nM | 33 nM |
|---|---|---|---|
| Control | .96 | 1.07 | 1.12 |
| WV-1868 | 1.18 | 1.06 | .85 |
| WV-3395 | .33 | .28 | .33 |
| WV-3396 | 1.02 | .51 | .23 |
| WV-3397 | .83 | .37 | .14 |
| WV-3398 | 1.07 | .22 | .06 |
| WV-3399 | .4 | .22 | .26 |
| WV-3400 | .87 | .52 | .18 |
| WV-3401 | 1.09 | .43 | .12 |
| WV-3402 | .37 | .12 | .06 |
| WV-3403 | 1.2 | 1.08 | .92 |
| WV-3404 | .29 | .15 | .25 |
| WV-3405 | .86 | .33 | .21 |
| WV-3406 | 1.18 | 1.26 | 1.14 |
| WV-3407 | .95 | .56 | .23 |
| WV-3408 | .31 | .15 | .21 |

TABLE 76B
Activity of oligonucleotides.

| Wave ID | 2.0 nM | 8.2 nM | 33 nM |
|---|---|---|---|
| Control | .96 | 1.07 | 1.12 |
| WV-1868 | 1.17 | 1.06 | .85 |
| WV-3409 | .6 | .31 | .45 |
| WV-3410 | .89 | .23 | .19 |
| WV-3411 | .63 | .12 | .07 |
| WV-3412 | .87 | .34 | .08 |
| WV-3413 | .85 | .31 | .05 |
| WV-3414 | 1.07 | .75 | .32 |
| WV-3415 | 1.02 | .25 | .44 |
| WV-3416 | .55 | .28 | .25 |
| WV-3417 | .68 | .23 | .31 |
| WV-3418 | .55 | .15 | .28 |
| WV-3419 | .81 | .63 | .38 |
| WV-3420 | 1.12 | .87 | .27 |
| WV-3421 | .48 | .17 | .23 |
| WV-3422 | 1.01 | .6 | .38 |

[1741] Table 77. Table 77 shows the in vitro potency of ASOs to PNPLA3. Tested oligonucleotides are: WV-1868, and WV-3423 to WV-3436.

TABLE 77
Activity of oligonucleotides.

| Wave ID | 2.0 nM | 8.2 nM | 33 nM |
|---|---|---|---|
| Control | 1.05 | 1.15 | 1.03 |
| WV-1868 | 1.07 | 1.07 | 1.03 |
| WV-3423 | .62 | .42 | .3 |
| WV-3424 | .69 | .4 | .2 |
| WV-3425 | 1.02 | .68 | .35 |
| WV-3426 | .92 | .46 | .37 |
| WV-3427 | .87 | .74 | .6 |
| WV-3428 | 1.08 | .88 | .97 |
| WV-3429 | 1.02 | .6 | .37 |
| WV-3430 | 1.13 | .94 | .48 |
| WV-3431 | .63 | .38 | .23 |
| WV-3432 | .97 | .63 | .31 |
| WV-3433 | .63 | .26 | .18 |
| WV-3434 | .81 | .31 | .2 |
| WV-3435 | .58 | .33 | .28 |
| WV-3436 | .93 | .71 | .5 |

[1742] Table 78. Table 78 shows the in vitro potency of ASOs to PNPLA3. Tested oligonucleotides are: WV-1868, and WV-3437 to WV-3450.

TABLE 78
Activity of oligonucleotides.

| Wave ID | 2.0 nM | 8.2 nM | 33 nM |
|---|---|---|---|
| Control | 1.05 | 1.15 | 1.03 |
| WV-1868 | 1.06 | 1.06 | 1.03 |
| WV-3437 | 1.06 | .54 | .22 |
| WV-3438 | .93 | .85 | 1 |
| WV-3439 | 1.01 | .75 | .56 |
| WV-3440 | 1.04 | 1.03 | .67 |
| WV-3441 | 1.16 | .8 | .38 |
| WV-3442 | 1.03 | .57 | .29 |
| WV-3443 | .45 | .25 | .2 |
| WV-3444 | .65 | .38 | .23 |
| WV-3445 | 1.18 | .78 | .42 |
| WV-3446 | .8 | .45 | .25 |
| WV-3447 | .86 | .59 | .25 |
| WV-3448 | .81 | .52 | .22 |
| WV-3449 | .74 | .43 | .2 |
| WV-3450 | .96 | .95 | .92 |

[1743] Table 79. Table 79 shows the efficacy of antisense oligonucleotides in knockdown of PNPLA3 mediated by RNase H, in a Hep3B 24 hour assay. Tested oligonucleotides are: WV-1868 (control), WV-3451, WV-3452, WV-3453, WV-3454, WV-3455, WV-3456, WV-3457, WV-3458, WV-3459, WV-3460, WV-3461, and WV-3462. WV-1868 is an antisense oligonucleotide (operating through RNase H-mediated knockdown), while other tested oligonucleotides are RNAi agents.

TABLE 79
Activity of oligonucleotides.

| Wave ID | 2.0 nM | 8.2 nM | 33 nM |
|---|---|---|---|
| Control | 1.05 | 1.15 | 1.04 |
| WV-1868 | 1.06 | 1.06 | 1.02 |
| WV-3451 | .97 | .55 | .24 |
| WV-3452 | 1.01 | .52 | .18 |
| WV-3453 | .43 | .19 | .19 |
| WV-3454 | .51 | .22 | .1 |
| WV-3455 | .62 | .35 | .18 |
| WV-3456 | .78 | .52 | .22 |
| WV-3457 | .74 | .37 | .11 |
| WV-3458 | .64 | .28 | .22 |
| WV-3459 | 1.15 | 1.09 | .9 |
| WV-3460 | .77 | .4 | .43 |
| WV-3461 | 1.13 | .54 | .23 |
| WV-3462 | .93 | .42 | .2 |

[1744] Table 8.1. Table 81 shows the in vitro potency and IC₅₀ for different oligonucleotides which target PNPLA3. Tested oligonucleotides are: WV-2477 (which knocks down the target via a RNA interference-mediated mechanism) and WV-3387 (which knocks down the target via RNase H-mediated knockdown).

TABLE 81
Activity of oligonucleotides.

| Conc. (nM) | | | | | | | | |
|---|---|---|---|---|---|---|---|---|
| (exp 10) | WV-2477-Hep3b | | WV-2447-Huh7 | | WV-3387-Hep3b | | WV-3387-Huh7 | |
| 0.796 | 1.031 | | 1.029 | 0.928 | 0.148 | 0.095 | 0.154 | 0.186 |
| 0.495 | | 0.982 | | 0.884 | 0.143 | 0.092 | 0.163 | 0.218 |
| 0.194 | 1.144 | 0.989 | 1.103 | 0.994 | 0.221 | 0.162 | 0.183 | |
| −0.107 | 1.068 | 1.201 | 1.259 | 1.008 | 0.273 | 0.254 | 0.321 | 0.361 |
| −0.408 | 1.193 | 1.075 | 0.947 | 1.111 | 0.350 | 0.385 | 0.515 | 0.490 |
| −0.709 | 1.113 | 1.003 | | 0.974 | 0.560 | 0.534 | 0.537 | 0.708 |
| −1.010 | 1.193 | 1.010 | 0.866 | 0.902 | 0.644 | 0.704 | 0.652 | 0.974 |
| −1.612 | | 0.989 | 1.044 | 1.051 | 0.861 | 0.820 | 1.029 | 0.825 |
| −2.214 | 1.185 | 0.976 | 0.954 | 1.051 | 0.929 | 0.956 | 0.947 | 0.866 |

| | IC50 (nM) | 95% CI |
|---|---|---|
| WV-2477-Hep3b | NA | — |
| WV-2477-Huh7 | NA | — |
| WV-3387-Hep3b | 0.205 | 0.16 to 0.254 |
| WV-3387-Huh7 | 0.311 | 0.186 to 0.602 |

[1745] Table 82. Table 82 shows the efficacy of antisense oligonucleotides in knockdown of PNPLA3 mediated by RNase H, in a Hep3B assay. Tested oligonucleotides are: WV-3380 (positive control), WV-3387, WV-3391, WV-3393, WV-3402, WV-3411, WV-3416, WV-3443, and WV-3454.

TABLE 82
Activity of oligonucleotides.

| Wave ID | IC50 (nM) |
|---|---|
| WV-3380 | 4.28 |
| WV-3387 | 1.29 |
| WV-3391 | 2.31 |
| WV-3393 | 2.21 |
| WV-3402 | 1.55 |
| WV-3411 | 5.32 |
| WV-3416 | 4.68 |
| WV-3443 | 1.22 |
| WV-3454 | 3.39 |

[1746] Table 83. Table 83 shows the 1050 of ASOs to PNPLA3 in Huh7 cells. Tested oligonucleotides are: WV-3380, WV-3387, WV-3391, WV-3393, WV-3402, WV-3411, WV-3416, WV-3443, and WV-3454.

TABLE 83
Activity of oligonucleotides.

| Wave ID | HEP3B IC50 (nM) | Huh7 IC50 (nM) |
|---|---|---|
| WV-3380 | 4.28 | 3.86 |
| WV-3387 | 1.29 | 1.91 |
| WV-3391 | 2.31 | 2.96 |
| WV-3393 | 2.21 | 5.5 |
| WV-3402 | 1.55 | 2.85 |
| WV-3411 | 5.32 | 8.27 |
| WV-3416 | 4.68 | 9.0 |
| WV-3443 | 1.22 | 2.55 |
| WV-3454 | 3.39 | 4.30 |

[1747] Table 84. Table 84 shows the in vitro potency of ASOs to PNPLA3. Tested oligonucleotides are: WV-3380, WV-3393, WV-3402, WV-3421, WV-3390, WV-3399, WV-3404, WV-3443, WV-3391, WV-3394, WV-3408, WV-3387, and WV-3381.

TABLE 84
IC50 of oligonucleotides.

| Wave ID | IC 50 nM |
|---|---|
| WV-3380 | 1.5 |
| WV-3393 | 1.1 |
| WV-3402 | 1.7 |
| WV-3421 | 1.4 |
| WV-3399 | 0.77 |
| WV-3404 | 1.6 |
| WV-3443 | 1.6 |
| WV-3391 | 0.65 |
| WV-3394 | 1.4 |
| WV-3408 | 0.92 |
| WV-3387 | 1.2 |
| WV-3381 | 1.4 |

[1748] Table 85. Table 85 shows the IC₅₀ of ASOs to PNPLA3. Tested oligonucleotides are: WV-3380, WV-3381, WV-3387. WV-3391, WV-3393, WV-3394, WV-3399, WV-3402, WV-3404, WV-3408, WV-3421, and WV-3443.

TABLE 85
IC50 of oligonucleotides.
Oligonucleotides had various sequences, and were
in the coding segment (CDS) or 3′ untranslated
region (3′UTR) of PNPLA3.

| Wave ID | IC 50 nM | Position |
|---|---|---|
| WV-3380 | 1.5 | CDS |
| WV-3393 | 1.1 | CDS |
| WV-3402 | 1.7 | CDS |
| WV-3421 | 1.4 | 3′UTR |
| WV-3399 | 0.77 | 3′UTR |
| WV-3404 | 1.6 | 3′UTR |
| WV-3443 | 1.6 | 3′UTR |
| WV-3391 | 0.65 | 3′UTR |
| WV-3394 | 1.4 | 3′UTR |
| WV-3408 | 0.92 | 3′UTR |
| WV-3387 | 1.2 | 3′UTR |
| WV-3381 | 1.4 | 3′UTR |

[1749] Oligonucleotides had various sequences, and were in the coding segment (CDS) or 3′ untranslated region (3′UTR) of PNPLA3.

[1750] Table 86. Table 86 shows the in vitro potency of ASOs to PNPLA3. Tested oligonucleotides are: WV-3421, WV-3393, WV-3380, and WV-3402. In the data shown in Tables 86 and 87, oligonucleotides with human sequences were tested in cyno cells. Ovals indicate a mismatch, wherein the oligo sequence matches the human sequence, but has a mismatch with the cyno sequence.

TABLE 86
Activity of oligonucleotides.

| Oligonucleotide | 0 nM | 0.01 nM | 1 nM | 8 nM | 25 nM |
|---|---|---|---|---|---|
| WV-3421 | .99 | .78 | .52 | .18 | .12 |
| WV-3380 | 1.01 | 1.12 | .99 | .55 | .29 |
| WV-3393 | .99 | 1.02 | .94 | .48 | .37 |
| WV-3402 | .96 | 1.01 | .82 | .56 | .39 |

Numbers represent relative PNPLA3 mRNA levels (PNPLA3/GAPDH). 1.0 would represent 100% mRNA level or 0% knockdown, and 0.0 would represent 0.0% mRNA level or 100% knockdown. Numbers am approximate, and error hats are not included. Cynomolgus monkey cells were treated in vitro.

[1751] Table 87. Table 87 shows the in vitro potency of ASOs to PNPLA3. Tested oligonucleotides are: WV-3404, WV-3399. WV-3443, and WV-3421.

TABLE 87
Activity of oligonucleotides.

| Oligonucleotide | 0 nM | 0.01 nM | 1 nM | 8 nM | 25 nM |
|---|---|---|---|---|---|
| WV-3404 | 1.01 | .95 | .81 | .33 | .36 |
| WV-3443 | 1.01 | 1.07 | 1.14 | .52 | .39 |
| WV-3399 | 1.04 | .97 | .83 | .84 | .80 |

Numbers represent relative PNPLA3 mRNA levels (PNPLA3/GAPDH). 1.0 would represent 100% mRNA level or 0% knockdown, and 0.0 would represent 0.0% mRNA level or 100% knockdown. Numbers ale approximate, and error bars are not included. Cynomolgus monkey cells were treated in vitro.

[1752] While not wishing to be bound by any particular theory, the present disclosure notes that further experiments also provided additional data supporting the conclusions that various putative single-stranded RNAi agents were, in fact, capable of mediating RNA interference; and that various oligonucleotides designed to be capable of mediating knockdown via a RNaseH-mediated mechanism in fact mediated knockdown via a RNaseH-mediated mechanism. The finding that a PNPLA3 oligonucleotide to a different target directed knockdown via a RNaseH-mediated mechanism supports the idea that another oligonucleotide of the same or a similar format but which has a PNPLA3 and is capable of knocking down PNPLA3 may likely do so also via a RNaseH-mediated mechanism.

[1753] In one experiment, an in vitro RNaseH assay was performed, with APOC3 oligonucleotide WV-1868 (ASO, mediating a RNase H knockdown mechanism of a non-PNPLA3 gene, APOC3) as a positive control, and APOC3 oligonucleotide WV-2110 (a single-stranded RNAi agent) as a negative control. RNA molecule WV-2372 is used as a test substrate. In the RNase H assay, dual mechanism APOC3 oligonucleotide WV-2111 mediated RNase H knockdown (data not shown).

[1754] In another experiment, an in vitro Ago-2 assay (for single-stranded RNA interference) was performed. This assay was performed with single-stranded RNAi agents to another gene, APOC3, but which have formats which are similar or identical to various formats described for PNPLA3 oligonucleotides. The finding that a PNPLA3 oligonucleotide to a different target directed RNA interference supports the idea that another oligonucleotide of the same or a similar format but which has a PNPLA3 and is capable of knocking down. PNPLA3 may likely do so also via directed RNA interference.

[1755] A RNA test substrate was WV-2372 (APOC3). In the results, the band representing the RNA test substrate is absent in the presence of APOC3 oligonucleotides WV-1308 and WV-2420, indicating that these oligonucleotides are single-stranded RNAi agents capable of mediating RNA interference. Various controls were used: Substrate in the absence of negative control ASO WV-2134; substrate in the presence of negative control ASO WV-2134, which does not mediate RNA interference; substrate in the absence of test oligonucleotide WV-1308; substrate in the absence of test oligonucleotide WV-2420; substrate alone; no substrate, with added WV-2134; and no substrate, with added WV-1308 (data not shown).

[1756] In another experiment, in vitro Ago-2 assay was (for single-stranded RNA interference) performed, using a APOC3 mRNA as a test substrate in a 3′ RACE assay in Hep3B cells. A cleavage product of the APOC3 mRNA in the presence of test oligonucleotide WV-3021 was detected, corresponding to cleavage of the mRNA at a site corresponding to a cut between positions 10 and 11 of WV-3021 (data not shown), which result is consistent with RNA interference. An artifactual cleavage product was also detected.

[1757] In other experiments, dual mechanism (hybrid format) APOC3 oligonucleotide WV 211.1 was shown to be capable of mediating knockdown by both RNase H and RNA interference. A RNA substrate for WV-2111, which comprises the sequence of GCUGGCCUCCCAAUAAAGCUGGACA (SEQ ID NO: 1129), which is complementary to the sequence of APOC3 oligonucleotide WV-2111, was found to be cleaved in the presence of WV-2111 at the following positions: GC/UGGC/C/U/CC/CAAUA//AAGCUGGACA (SEQ ID NO: 1130), wherein / indicates a cleavage site in a position typical of RNaseH activity, and // indicates a cleavage site in a position typical of Ago-2 (RNA interference) activity. These data support the idea that WV-2111 mediates knockdown via both RNaseH and RNA interference mechanisms.

[1758] Several oligonucleotides were also found to be capable of mediating RNA interference in an Ago-2 in vitro assay. A RNA test substrate was APOC3 oligonucleotide WV-2372; this substrate disappeared in the presence of APOC3 oligonucleotides WV-1308, WV-2114, WV-2386, or WV-2387 (each tested separately), indicating that each of these oligonucleotides is capable of acting as single-stranded RNAi agents mediating RNA interference.

[1759] While not wishing to be bound by any particular theory, the present disclosure suggests that at least some of the oligonucleotides designated herein as single-stranded RNAi agents mediate knockdown via a RISC (RNA interference silencing complex); however, in at least some experiments, oligonucleotides designated herein as single-stranded RNAi agents were capable of mediating an observed knockdown of the protein level of a target greater than the observed knockdown of the corresponding mRNA level, and, while not wishing to be bound by any particular theory, the present disclosure suggests that this observation is consistent with the conjecture that some oligonucleotides designated herein as single-stranded RNAi agents which are capable of knocking down of a target gene or protein may be able to do so via a RISC-mediated mechanism and/or steric hindrance.

[1760] The present disclosure presents many non-limiting examples of oligonucleotides, having any of various sequences, formats, modifications, 5′-end regions, seed regions, post-seed regions, and 3′-end regions, and which are capable of mediating single-stranded RNA interference (e.g., single-stranded RNAi agents).

[1761] FIG. 3. FIGS. 3A and 3B show example multimer formats. Oligonucleotides can be joined directly and/or through linkers. As illustrated, a multimer can comprise oligonucleotide monomers of the same or different structures/types. In some embodiments, a monomer of a multi mer is an ssRNAi agent, in some embodiments, a monomer of a multimer is a RNase H-dependent antisense oligonucleotide (ASO). Monomers can be joined through various positions, for example, the 5′-end, the 3′-end, or positions in between.

[1762] Shown directly below is a phosphoramidite useful for linking oligonucleotide monomers through formation of disulfide linkers. After incorporation into oligonucleotide monomers, a thioester can be hydrolyzed to release a free thiol, which can react with a thiol of another oligonucleotide monomer 10 form a disulfide bond, thereby linking oligonucleotide monomers together. Multiple thiol groups may be incorporated into oligonucleotides so that multimers of various numbers of monomers may be formed.

[chemical structure]

[1763] Table 90 shows in vitro allele-specific suppression of different oligonucleotides which target PNPLA3. Example oligonucleotides are completely complementary to target sequences of one allele, which target sequences comprise one or two SNP sites. One SNP site is associated with I148M change in protein sequence. Oligonucleotides comprising target-binding sequences that are completely complementary to target sequences comprising both SNPs were assessed in Hep3B cells (wild-type, C and C, I148) and Huh7 cells (with double mutation, T and G, M148). The double mutation was tested at various positions (8 and 11; 9 and 12; 10 and 13; etc.) and with various modifications to identify oligonucleotides capable of allele-specific knockdown of PNPLA3.

[1764] As shown in Table 90B, WV-7778 to WV-7793 and WV-3858 to WV-3864 were tested. In these oligonucleotides, the first and the last internucleotidic linkages in the wings are stereorandom PS and the others are PO; the 5′ wing and the 3′ wing comprise 2′-OMe. Several oligonucleotides demonstrated allele-specific knockdown of PNPLA3.

TABLE 90B
Activity of oligonucleotides.

| | Hep3B | | Huh7 | |
|---|---|---|---|---|
| mock | 100 | 100 | 100 | 100 |
| WV-7778 | 92.8 | 86.9 | 63.6 | 52.7 |
| WV-7779 | 92.6 | 85.8 | 59.2 | 48.0 |
| WV-7780 | 102.3 | 97.1 | 36.4 | 34.8 |
| WV-7781 | 111.8 | 102.4 | 46.1 | 38.9 |
| WV-7782 | 108.5 | 94.7 | 43.3 | 35.0 |
| WV-7783 | 110.2 | 97.5 | 36.6 | 33.7 |
| WV-7784 | 105.0 | 95.9 | 41.2 | 41.9 |
| WV-7785 | 108.7 | 107.4 | 73.8 | 57.5 |
| WV-3858 | 103.3 | 103.6 | 55.1 | 52.3 |
| WV-3859 | 94.7 | 96.1 | 41.8 | 41.2 |
| WV-3860 | 104.2 | 94.1 | 46.7 | 45.6 |
| WV-3861 | 101.8 | 99.2 | 47.1 | 45.2 |
| WV-3862 | 97.1 | 96.5 | 44.0 | 42.3 |
| WV-3863 | 99.7 | 86.0 | 42.0 | 51.5 |
| WV-3864 | 97.8 | 96.8 | 53.5 | 38.9 |
| WV-7786 | 99.1 | 104.3 | 37.0 | 38.0 |
| WV-7787 | 84.2 | 87.5 | 23.0 | 25.1 |
| WV-7788 | 80.4 | 88.0 | 35.5 | 28.5 |
| WV-7789 | 82.7 | 85.7 | 25.4 | 25.5 |
| WV-7790 | 80.8 | 85.1 | 27.4 | 29.8 |
| WV-7791 | 87.1 | 80.1 | 40.8 | 42.1 |
| WV-7792 | 78.1 | 73.1 | 42.5 | 46.5 |
| WV-7793 | 68.3 | 65.1 | 49.9 | 44.9 |

[1765] As shown in Table 90C, WV-7794 to WV-7816 were tested in these oligonucleotides, the first and the last internucleotidic linkages in the wings are stereorandom PS and the others are PO; the 5′ wing and the 3′ wing comprise 2′-MOE. Several oligonucleotides demonstrated allele-specific knockdown of PNPLA3.

TABLE 90C
Activity of oligonucleotides.

| | Hep3B | | Huh7 | |
|---|---|---|---|---|
| mock | 100 | 100 | 100 | 100 |
| WV-7794 | 47.6 | 44.5 | 25.0 | 20.6 |
| WV-7795 | 58.5 | 52.8 | 14.3 | 14.8 |
| WV-7796 | 54.6 | 56.4 | 16.3 | 15.5 |
| WV-7797 | 75.1 | 74.2 | 13.5 | 12.8 |
| WV-7798 | 78.4 | 79.8 | 11.9 | 13.7 |
| WV-7799 | 89.9 | 92.4 | 23.5 | 25.7 |
| WV-7800 | 93.6 | 92.2 | 34.1 | 29.9 |
| WV-7801 | 90.3 | 90.3 | 38.4 | 29.3 |
| WV-7802 | 101.1 | 101.3 | 25.1 | 29.6 |
| WV-7803 | 102.0 | 103.2 | 24.8 | 25.8 |
| WV-7804 | 95.9 | 97.2 | 27.8 | 32.7 |
| WV-7805 | 100.5 | 95.5 | 21.9 | 22.0 |
| WV-7806 | 110.6 | 105.4 | 22.0 | 21.2 |
| WV-7807 | 96.2 | 101.5 | 21.1 | 23.8 |
| WV-7808 | 95.5 | 101.0 | 21.5 | 18.8 |
| WV-7809 | 85.3 | 84.2 | 17.1 | 15.7 |
| WV-7810 | 92.0 | 95.9 | 25.2 | 21.6 |
| WV-7811 | 100.1 | 100.0 | 26.6 | 27.1 |
| WV-7812 | 79.5 | 82.1 | 22.3 | 21.1 |
| WV-7813 | 83.7 | 76.2 | 23.7 | 18.2 |
| WV-7814 | 87.8 | 82.8 | 44.3 | 39.2 |
| WV-7815 | 78.1 | 74.8 | 45.3 | 37.1 |
| WV-7816 | 59.5 | 52.4 | 24.5 | 20.5 |

[1766] As shown in Table 90D, WV-7817 to WV-7839 were tested. In these oligonucleotides, the first and the last nucleotide are LNA; the 5′ wing has a LNA at the 5′ end of the oligonucleotide followed by several 2′-OMe; and the 3′ wing has several 2′-OMe followed by a LNA at the 3′ end of the oligonucleotide. Several oligonucleotides demonstrated allele-specific knockdown of PNPLA3.

TABLE 90D
Activity of oligonucleotides.

| | Hep3B | | Huh7 | |
|---|---|---|---|---|
| mock | 100 | 100 | 100 | 100 |
| WV-7817 | 71.4 | 60.1 | 34.0 | 30.2 |
| WV-7818 | 68.1 | 75.8 | 44.0 | 30.0 |
| WV-7819 | 68.5 | 76.6 | 20.7 | 20.7 |
| WV-7820 | 87.7 | 86.0 | 24.0 | 22.4 |
| WV-7821 | 90.1 | 89.3 | 17.7 | 15.3 |
| WV-7822 | 101.2 | 87.2 | 19.6 | 11.7 |
| WV-7823 | 83.3 | 87.7 | 22.9 | 17.8 |
| WV-7824 | 99.0 | 101.9 | 31.1 | 31.6 |
| WV-7825 | 94.0 | 89.5 | 28.7 | 22.6 |
| WV-7826 | 95.6 | 87.5 | 21.2 | 17.6 |
| WV-7827 | 113.3 | 104.4 | 22.1 | 19.3 |
| WV-7828 | 108.1 | 102.8 | 25.7 | 23.6 |
| WV-7829 | 99.8 | 97.9 | 20.5 | 21.7 |
| WV-7830 | 95.9 | 87.8 | 18.5 | 19.2 |
| WV-7831 | 89.8 | 89.2 | 21.3 | 23.4 |
| WV-7832 | 76.2 | 71.7 | 9.4 | 11.8 |
| WV-7833 | 68.2 | 76.8 | 14.1 | 10.4 |
| WV-7834 | 69.5 | 71.2 | 17.4 | 16.5 |
| WV-7835 | 69.6 | 68.7 | 11.0 | 9.4 |
| WV-7836 | 59.8 | 67.8 | 18.3 | 21.0 |
| WV-7837 | 60.8 | 63.7 | 25.6 | 28.4 |
| WV-7838 | 48.2 | 50.5 | 16.8 | 13.5 |
| WV-7839 | 35.0 | 39.1 | 10.5 | 11.8 |

[1767] As shown in Table 90E, WV-7840 to WV-7862 were tested. In these oligonucleotides, the first and the last nucleotide are LNA; the 5′ wing has a LNA at the 5′ end of the oligonucleotide followed by several 2′-MOE; and the 3′ wing has several 2′-MOE (or 5-methyl 2′-MOE) followed by a LNA at the 3′ end of the oligonucleotide. Several oligonucleotide demonstrated allele-specific knockdown of PNPLA3.

TABLE 90E
Activity of oligonucleotides.

| | Hep3B | | Huh7 | |
|---|---|---|---|---|
| mock | 100 | 100 | 100 | 100 |
| WV-7840 | 32.7 | 37.7 | 12.8 | 14.8 |
| WV-7841 | 45.9 | 49.8 | 8.1 | 10.6 |
| WV-7842 | 43.2 | 50.4 | 7.6 | 7.0 |
| WV-7843 | 53.7 | 61.0 | 8.7 | 10.6 |
| WV-7844 | 69.2 | 69.0 | 14.3 | 14.9 |
| WV-7845 | 80.8 | 83.7 | 15.0 | 13.7 |
| WV-7846 | 77.1 | 86.3 | 16.5 | 15.7 |
| WV-7847 | 85.2 | 96.4 | 18.5 | 15.6 |
| WV-7848 | 87.2 | 89.4 | 21.7 | 18.0 |
| WV-7849 | 65.0 | 74.2 | 17.2 | 16.7 |
| WV-7850 | 98.8 | 107.4 | 15.3 | 18.7 |
| WV-7851 | 105.0 | 95.8 | 11.4 | 15.9 |
| WV-7852 | 113.7 | 86.9 | 14.2 | 14.2 |
| WV-7853 | 108.5 | 90.7 | 10.1 | 14.3 |
| WV-7854 | 109.6 | 94.9 | 11.3 | 12.4 |
| WV-7855 | 81.9 | 82.8 | 7.4 | 5.4 |
| WV-7856 | 86.3 | 82.0 | 11.5 | 11.2 |
| WV-7857 | 95.3 | 78.1 | 14.6 | 15.6 |
| WV-7858 | 63.0 | 66.3 | 8.6 | 9.8 |
| WV-7859 | 65.4 | 61.5 | 12.9 | 15.9 |
| WV-7860 | 69.4 | 70.0 | 30.4 | 34.2 |
| WV-7861 | 51.9 | 49.0 | 14.8 | 26.8 |
| WV-7862 | 37.4 | 41.3 | 10.4 | 11.2 |

[1768] As shown in Table 90F, WV-993, WV-3390, and WV-4054 were tested.

TABLE 90F
Activity of oligonucleotides.

| | Hep3B | | Huh7 | |
|---|---|---|---|---|
| mock | 100.0 | 100.0 | 100.0 | 100.0 |
| UT (untreated) | 92.4 | 98.7 | 93.1 | 107.0 |
| WV-993 | 108.0 | 117.8 | 115.8 | 137.6 |
| 10 nM | | | | |
| WV-3390 | 84.5 | 84.1 | 46.5 | 57.6 |
| 2 nM | | | | |
| WV-3390 | 50.0 | 53.9 | 15.7 | 24.4 |
| 10 nM | | | | |
| WV-4054 | 95.8 | 95.1 | 30.0 | 35.7 |
| 2 nM | | | | |
| WV-4054 | 85.5 | 91.8 | 30.2 | 37.5 |
| 10 nM | | | | |

[1769] As shown in Table 90G, WV-3860 to WV-3864 were tested. Oligonucleotides had mismatches (between wildtype and mutant alleles) at positions 8 and 11 (WV-3860); 9 and 12 (WV 3861); 10 and 13 (WV-3862); 11 and 14 (WV-3863); and 12 and 15 (WV-3864). Several oligonucleotides demonstrated allele-specific knockdown of PNPLA3, particularly at a concentration of 8 nM.

TABLE 90G
Activity of oligonucleotides.

| nM | WV-3860 Hep3B | | WV-3861 Hep3B | | WV-3862 Hep3B | | WV-3863 Hep3B | |
|---|---|---|---|---|---|---|---|---|
| 50 | 37.7 | 44.4 | 44.3 | 47.7 | 21.9 | 32.3 | 32.0 | 32.8 |
| 20 | 83.9 | 89.7 | 87.7 | 93.9 | 64.7 | 72.1 | 81.7 | 87.3 |
| 8 | 95.8 | 95.4 | 101.9 | 103.4 | 90.8 | 92.0 | 84.3 | 93.9 |
| 3.2 | 105.9 | 93.0 | 94.3 | 90.7 | 98.1 | 98.3 | 88.3 | 86.8 |
| 1.28 | 100.9 | 93.4 | 81.0 | 95.4 | 91.0 | 92.7 | 90.9 | 87.4 |
| 0.512 | 90.5 | 96.6 | 94.9 | 88.3 | 92.5 | 93.3 | 87.1 | 88.7 |
| 0.205 | 110.1 | 99.0 | 93.2 | 95.4 | 95.7 | 89.5 | 89.7 | 92.5 |
| 0.082 | 96.6 | 95.6 | 94.8 | 96.2 | 95.3 | 97.8 | 86.7 | 93.9 |
| 0.033 | 98.5 | 88.1 | 98.0 | 95.3 | 103.7 | 93.2 | 93.3 | 87.8 |
| 0.013 | 97.1 | 95.6 | 91.1 | 92.4 | 100.9 | 90.9 | 91.7 | 90.9 |
| nM | WV-3864 Hep3B | | WV-3860 Huh7 | | WV-3861 Huh7 | | WV-3862 Huh7 | |
| 50 | 31.8 | 43.9 | 11.4 | 9.3 | 12.4 | 8.4 | 6.8 | 8.4 |
| 20 | 98.4 | 99.4 | 23.7 | 25.9 | 25.9 | 24.4 | 16.8 | 14.0 |
| 8 | 100.7 | 107.4 | 47.9 | 51.3 | 46.0 | 44.0 | 40.7 | 42.6 |
| 3.2 | 94.9 | 102.7 | 84.1 | 67.6 | 63.7 | 68.7 | 56.9 | 77.6 |
| 1.28 | 96.3 | 95.6 | 100.5 | 83.9 | 80.4 | 83.7 | 77.3 | 81.0 |
| 0.512 | 89.7 | 102.4 | 100.5 | 97.3 | 85.9 | 87.5 | 78.0 | 85.6 |
| 0.205 | 96.3 | 93.8 | 101.6 | 99.9 | 83.7 | 76.6 | 73.4 | 85.7 |
| 0.082 | 89.5 | 92.1 | 81.4 | 87.3 | 85.3 | 84.1 | 78.9 | 89.3 |
| 0.033 | 92.7 | 94.2 | 114.4 | 90.6 | 100.4 | 87.6 | 87.5 | 84.6 |
| 0.013 | 91.7 | 106.0 | 107.0 | 93.7 | 82.3 | 88.1 | 78.3 | 91.6 |

| nM | WV-3863 Huh7 | | WV-3864 Huh7 | |
|---|---|---|---|---|
| 50 | 5.6 | 10.6 | 8.4 | 8.3 |
| 20 | 20.0 | 13.4 | 16.5 | 13.9 |
| 8 | 37.4 | 40.8 | 47.9 | 43.3 |
| 3.2 | 67.5 | 60.5 | 75.6 | 65.5 |
| 1.28 | 84.9 | 82.5 | 86.2 | 87.0 |
| 0.512 | 79.4 | 81.1 | 95.6 | 91.0 |
| 0.205 | 83.0 | 86.3 | 89.1 | 96.1 |
| 0.082 | 79.5 | 92.5 | 89.4 | 77.9 |
| 0.033 | 79.7 | 102.1 | 104.6 | 86.4 |
| 0.013 | 94.6 | 96.8 | 93.0 | 104.9 |

[1770] As shown in Table 90H, WV-7804 to WV-7808 were tested. Oligonucleotides had mismatches at positions 8 and 11 (WV-7804); 9 and 12 (WV-7805); 10 and 13 (WV-7806); 11 and 14 (WV-7807); and 12 and 15 (WV-7808). Some oligonucleotides demonstrated allele-specific knockdown of PNPLA3, particularly at concentrations of 3.2 and 8 nM.

TABLE 90H
Activity of oligonucleotides.

| nM | WV-7804 Hep3B | | WV-7805 Hep3B | | WV-7806 Hep3B | | WV-7807 Hep3B | |
|---|---|---|---|---|---|---|---|---|
| 50 | 63.3 | 69.5 | 60.3 | 62.7 | 69.6 | 65.1 | 75.0 | 75.5 |
| 20 | 84.6 | 98.4 | 81.8 | 86.1 | 90.1 | 89.4 | 95.3 | 95.4 |
| 8 | 101.1 | 102.9 | 96.9 | 98.5 | 100.8 | 94.7 | 101.2 | 95.5 |
| 3.2 | 92.9 | 95.1 | 90.7 | 98.1 | 98.9 | 92.1 | | 88.8 |
| 1.28 | 95.5 | 98.6 | 91.3 | 97.0 | 95.9 | 90.9 | 97.3 | 103.6 |
| 0.512 | 96.2 | 110.4 | 95.5 | 97.9 | 95.9 | 94.8 | 100.9 | 92.7 |
| 0.205 | 92.0 | 99.5 | 90.5 | 100.7 | 99.3 | 94.7 | 96.4 | 99.8 |
| 0.082 | 97.6 | 93.6 | 92.2 | 107.6 | 92.3 | 93.8 | 93.4 | 103.7 |
| 0.033 | 98.4 | 101.4 | 98.5 | 104.0 | 99.6 | 90.1 | 89.2 | 93.3 |
| 0.013 | 96.7 | 100.4 | 95.0 | 105.8 | 90.1 | 97.5 | 90.6 | 87.5 |

| nM | WV-7808 Hep3B | WV-7804 Huh7 | | WV-7805 Huh7 | | WV-7806 Huh7 | |
|---|---|---|---|---|---|---|---|
| 50 | 72.2 | 4.4 | 7.5 | 1.7 | 8.4 | 9.8 | 3.8 |
| 20 | 98.9 | 3.5 | 11.1 | 7.1 | 11.9 | 2.8 | 7.2 |
| 8 | 117.8 | 25.1 | 23.3 | 19.6 | 11.6 | 13.8 | 12.5 |
| 3.2 | 109.5 | 45.3 | 48.0 | 36.1 | 38.4 | 28.8 | 39.7 |
| 1.28 | 116.3 | 68.9 | 77.1 | 59.2 | 76.2 | 68.7 | 68.5 |
| 0.512 | 110.9 | 74.6 | 76.0 | 75.3 | 78.4 | 66.6 | 82.4 |
| 0.205 | 109.3 | 73.6 | 86.5 | 69.8 | 81.1 | 69.7 | 80.3 |
| 0.082 | 116.8 | 82.9 | 89.4 | 75.0 | 86.9 | 78.6 | 79.7 |
| 0.033 | 111.1 | 81.8 | 96.1 | 78.0 | 95.8 | 89.4 | 87.3 |
| 0.013 | 104.6 | 86.7 | 90.4 | 79.6 | 95.0 | 88.6 | 98.0 |

| nM | WV-7807 Huh7 | | WV-7808 Huh7 | |
|---|---|---|---|---|
| 50 | 3.0 | 3.9 | 1.8 | 1.4 |
| 20 | 12.6 | 9.1 | 1.9 | 5.2 |
| 8 | 25.1 | 14.9 | 14.2 | 9.1 |
| 3.2 | 46.9 | 41.5 | 37.1 | 33.2 |
| 1.28 | 78.0 | 70.4 | 63.6 | 65.2 |
| 0.512 | 85.3 | 73.7 | 71.0 | 77.4 |
| 0.205 | 98.8 | 68.5 | 79.2 | 92.3 |
| 0.082 | 92.6 | 75.3 | 88.0 | 71.2 |
| 0.033 | 85.6 | 81.9 | 84.1 | 83.5 |
| 0.013 | 85.5 | 94.7 | 95.3 | 78.1 |

[1771] As shown in Table 90I, WV-7827 to WV-7831 were tested. Oligonucleotides had mismatches at positions 8 and 11 (WV-7827); 9 and 12 (WV-7828); 10 and 13 (WV-7829); 1.1 and 14 (WV-7830); and 12 and 15 (WV-783.1). Several oligonucleotides demonstrated allele-specific knockdown of PNPLA3, particularly at concentrations of 3.2 and 8 nM.

TABLE 90I
Activity of oligonucleotides.

| nM | WV-7827 Hep3B | | WV-7828 Hep3B | | WV-7829 Hep3B | | WV-7830 Hep3B | |
|---|---|---|---|---|---|---|---|---|
| 50 | 37.01 | 34.29 | 36.95 | 32.75 | 25.05 | 33.48 | 36.76 | 54.22 |
| 20 | 79.06 | 85.05 | 85.88 | 77.16 | 82.21 | 79.79 | 79.33 | 87.62 |
| 8 | 97.28 | 89.87 | 93.46 | 91.76 | 99.65 | 98.83 | 97.94 | 97.83 |
| 3.2 | 94.15 | 89.12 | 97.63 | 90.63 | 92.57 | 92.37 | | 104.59 |
| 1.28 | 97.02 | 95.4 | 94.2 | 88.81 | 93.55 | 94.13 | 100.19 | 113.12 |
| 0.512 | 105.31 | 93.06 | 97.26 | 96.7 | 95.81 | 104.04 | 107.33 | 109.89 |
| 0.205 | 107.16 | 97.39 | 92 | 91.65 | 103.76 | 102.33 | 104.56 | 100.78 |
| 0.082 | 100.92 | 101.71 | 94.43 | 88.97 | 93.95 | 105.59 | 94.95 | 110.09 |
| 0.033 | 98.82 | 95.76 | 92.83 | 92.84 | 91.46 | 103.11 | 97.7 | 93.54 |
| 0.013 | 96.78 | 93.38 | 92.91 | 90.28 | 86.25 | 104.33 | 96.73 | 98.6 |
| nM | WV-7831 Hep3B | | WV-7827 Huh7 | | WV-7828 Huh7 | | WV-7829 Huh7 | |
| 50 | 53.44 | 62.49 | 3.75 | 3.01 | 2.29 | 1.48 | 5.61 | 7.19 |
| 20 | 97.35 | 92.9 | 6.33 | 5.79 | 16.31 | 9.08 | 16.41 | 9.26 |
| 8 | 103.88 | 103.69 | 13.45 | 13.44 | 9.77 | 24.96 | 31.07 | 18.62 |
| 3.2 | 104.8 | 99.48 | 34.11 | 44.07 | 31.43 | 31.51 | 54.15 | 31.49 |
| 1.28 | 99.77 | 102.88 | 57.91 | 67.23 | 63.32 | 69.34 | 78.28 | 65.69 |
| 0.512 | 102.56 | 99.81 | 80.58 | 87.32 | 83.18 | 75.78 | 94.09 | 75.96 |
| 0.205 | 111.83 | 98.89 | 71.87 | 84.73 | 74.94 | 76.52 | 87.05 | 90.6 |
| 0.082 | 102.02 | 93.55 | 74.43 | 76.07 | 82.31 | 87.03 | 97.43 | 87.48 |
| 0.033 | 93.54 | 101.84 | 77.64 | 80.62 | 89.1 | 89.96 | 108.41 | 81.93 |
| 0.013 | 101.47 | 100.78 | 77.47 | 74.02 | 83.14 | 79.83 | 100.58 | 88.97 |
| nM | WV-7830 Huh7 | | WV-7831 Huh7 | | | | | |
| 50 | 4.11 | 5.5 | 3.5 | 5.45 | | | | |
| 20 | 6.32 | 5.86 | 5.62 | 10.22 | | | | |
| 8 | 12.5 | 16.99 | 15.15 | 23.97 | | | | |
| 3.2 | 35.34 | 40.2 | 35 | 40.3 | | | | |
| 1.28 | 56.82 | 76.27 | 73.64 | 73.96 | | | | |
| 0.512 | 86.38 | 77.53 | 83.87 | 88.08 | | | | |
| 0.205 | 80.08 | 79.81 | 85.02 | 86.98 | | | | |
| 0.082 | 95.69 | 98.61 | 82.31 | 111.77 | | | | |
| 0.033 | 86.65 | 93.2 | 85.86 | 85.82 | | | | |
| 0.013 | 94.2 | 85.75 | 81.84 | 93.28 | | | | |

[1772] As shown in Table 90J, WV-993 (negative control), WV-3391) (positive control), WV-4054, WV-7850 to WV-7854 were tested. The oligonucleotides had mismatches at positions 8 and 11 (WV-7850); 9 and 12 (WV-7851); 10 and 13 (WV-7852); 11 and 14 (WV-7853); and 12 and 15 (WV-7854). Several oligonucleotides demonstrated high allele-specific knockdown of PNPLA3, particularly at concentrations of 3.2 and 8 nM.

TABLE 90J
Activity of oligonucleotides.

| nM | WV-7850 Hep3B | | WV-7851 Hep3B | | WV-7852 Hep3B | | WV-7853 Hep3B | |
|---|---|---|---|---|---|---|---|---|
| 50 | 38.95 | 43.11 | 38.2 | 54.32 | 34.89 | 44.6 | 28.33 | 29.79 |
| 20 | 65.77 | 72.48 | 80.99 | 84.09 | 69.74 | 74.87 | 66.38 | 50.49 |
| 8 | 92.95 | 82.91 | 93.58 | 96.06 | 89.54 | 101.29 | 85.15 | 81.31 |
| 3.2 | 91.26 | 86.61 | 90.46 | 94.37 | 97.29 | 91.77 | | 96.08 |
| 1.28 | 111.06 | 94.39 | 98.64 | 92.99 | 89.98 | 111.31 | 96.26 | 97.11 |
| 0.512 | 106.14 | 87.28 | 94.61 | 94.09 | 96.79 | 95.82 | 109.19 | 105.33 |
| 0.205 | 84.62 | 87.72 | 100.09 | 99.5 | 111.54 | 99.81 | 95.06 | 94.02 |
| 0.082 | 97.3 | 89.13 | 90.19 | 87.13 | 92.11 | 100.64 | 95.93 | 104.77 |
| 0.033 | 88.83 | 89.09 | 96.09 | 101.92 | 96.1 | 95.83 | 95.56 | 95.83 |
| 0.013 | 91.98 | 92.51 | 100.59 | 92.81 | 98.94 | 109.53 | 99.05 | 97.36 |
| nM | WV-7854 Hep3B | | WV-7850 Huh7 | | WV-7851 Huh7 | | WV-7852 Huh7 | |
| 50 | 16.7 | 18.84 | 2.74 | 4.3 | 2.13 | 1.26 | 8.39 | 7.43 |
| 20 | 63.04 | 59.9 | 5.33 | 5.88 | 6.09 | 4.64 | 7.76 | 5.84 |
| 8 | 82.27 | 80.67 | 11.67 | 9.74 | 1.12 | 14.86 | 9.96 | 10.6 |
| 3.2 | 92.77 | 89.43 | 25.14 | 13.84 | 31.45 | 25.89 | 28.6 | 25.4 |
| 1.28 | 90.63 | 83.96 | 57.25 | 62.49 | 55.19 | 52.3 | 49.96 | 56.13 |
| 0.512 | 88.27 | 86.56 | 75.21 | 73.3 | 81.73 | 81.67 | 72.77 | 87.64 |
| 0.205 | 89.69 | 88.92 | 71.16 | 74.28 | 91.84 | 94.95 | 82.61 | 85.11 |
| 0.082 | 95.16 | 89.43 | 84.71 | 75.77 | 91 | 79.62 | 96.22 | 83.67 |
| 0.033 | 99.41 | 94.3 | 80.67 | 93.66 | 84.27 | 79.5 | 72.16 | 70.12 |
| 0.013 | 88 | 96.49 | 96.84 | 104.2 | 86.94 | 81.37 | 94.13 | 88.49 |
| nM | WV-7853 Huh7 | | WV-7854 Huh7 | | | | | |
| 50 | 2.91 | 3.83 | 0.56 | 5.35 | | | | |
| 20 | 5.38 | 4.3 | 2.43 | 7.48 | | | | |
| 8 | 6.36 | 8.51 | 9.91 | 10.31 | | | | |
| 3.2 | 27.05 | 23.79 | 23.52 | 22.24 | | | | |
| 1.28 | 47.78 | 62.17 | 47.66 | 45.94 | | | | |
| 0.512 | 70.13 | 93.78 | 76.63 | 66.5 | | | | |
| 0.205 | 96.01 | 74.6 | 84.06 | 72.69 | | | | |
| 0.082 | 82.68 | 90.37 | 79.33 | 82.72 | | | | |
| 0.033 | 89.38 | 93.35 | 89.39 | 83.68 | | | | |
| 0.013 | 86.29 | 95.77 | 98.79 | 96.55 | | | | |

[1773] As shown in Table 90K and 90L, WV-3860 to WV-3864, WV-7804 to WV-7808, WV-7827 to WV-7831, and WV-7850 to WV-7854 were tested. WV-4054 demonstrated high allele-specific activity.

TABLE 90K
Activity of oligonucleotides.

| nM | WV-3390 Hep3B | | WV-3390 Huh7 | |
|---|---|---|---|---|
| 50 | 8.21 | 7.25 | 8.29 | 8.93 |
| 20 | 6.38 | 7.65 | 8.38 | 6.55 |
| 8 | 12.25 | 18.67 | 14.29 | 10.45 |
| 3.2 | 45.11 | 53.94 | 44.3 | 57.9 |
| 1.28 | 77.33 | 87.7 | 75.75 | 79.58 |
| 0.512 | 89.66 | 91.59 | 75.55 | 114.48 |
| 0.205 | 88.47 | 99.01 | 77.44 | 93.14 |
| 0.082 | 90.52 | 101.67 | 81.19 | 91 |
| 0.033 | 100.47 | 102.34 | 78.08 | 106.05 |
| 0.013 | 111.98 | 101.98 | 93.49 | 92.23 |
| nM | WV-4054 Hep3B | | WV-4054 Huh7 | |
| 8 | 77.1 | 75.46 | 25.4 | 28.99 |
| 3.2 | 64.83 | 77.36 | 19.76 | 30.45 |
| 1.28 | 75.7 | 80.58 | 20.26 | 28 |
| 0.512 | 83.19 | 91.18 | 27.99 | 30.12 |
| 0.205 | 96.79 | 100.8 | 48.79 | 51.24 |
| 0.082 | 96.97 | 105.15 | 51.71 | 65.92 |
| 0.033 | 98.21 | 96.76 | 82.73 | 90.69 |
| 0.013 | 100.71 | 110.73 | 89.25 | 101.52 |
| nM | WV-993 Hep3B | | WV-993 Huh7 | |
| 50 | 46.96 | 63.05 | 64.33 | 84.69 |
| 20 | 85.99 | 93.33 | 85.91 | 92.58 |
| 8 | 94.55 | 112.34 | 108.31 | 90.19 |
| 3.2 | 94.42 | 101.21 | 98.4 | 102.07 |
| 1.28 | 90.96 | 98.52 | 104.92 | 108.34 |
| 0.512 | 87.71 | 95.84 | 96.98 | 87.06 |
| 0.205 | 91.78 | 93.62 | 114.92 | 90.64 |
| 0.082 | 86.49 | 96.33 | 109.17 | 101.77 |
| 0.033 | 87.45 | 104.34 | 102.65 | 92.43 |
| 0.013 | 90.55 | 100.97 | 114.84 | 108.07 |

TABLE 90L
IC50 of various oligonucleotides in Huh7 cells (mutant allele).

| Mismatch | Oligonucleotides | IC₅₀ | Oligonucleotides | IC₅₀ |
|---|---|---|---|---|
| Positions | 2′OMe | (nM) | 2′MOE | (nM) |
| 8, 11 | WV-3860 | 10.6 | WV-7804 | 4.0 |
| 9, 12 | WV-3861 | 10.4 | WV-7805 | 3.0 |
| 10, 13 | WV-3862 | 10.6 | WV-7806 | 2.6 |
| 11, 14 | WV-3863 | 7.8 | WV-7807 | 4.0 |
| 12, 15 | WV-3864 | 9.5 | WV-7808 | 2.9 |
| Mismatch | Oligonucleotides | IC₅₀ | Oligonucleotides | IC₅₀ |
| Positions | 2′MOE LNA | (nM) | 2′OMe LNA | (nM) |
| 8, 11 | WV-7850 | 1.6 | WV-7827 | 3.8 |
| 9, 12 | WV-7851 | 2.2 | WV-7828 | 2.8 |
| 10, 13 | WV-7852 | 1.9 | WV-7829 | 3.0 |
| 11, 14 | WV-7853 | 1.8 | WV-7830 | 2.6 |
| 12, 15 | WV-7854 | 1.3 | WV-7831 | 3.3 |

TABLE 91
Activity of oligonucleotides.
PNPLA3 mRNA level
(PNPLA3/HPRT1)

| Conc (nM) | | | | | | | | |
|---|---|---|---|---|---|---|---|---|
| exp 10 | 1.477 | 1.079 | 0.681 | 0.283 | −0.114 | −0.512 | −0.910 | −1.308 |
| WV-7808 | 0.200 | 0.366 | 0.424 | 0.576 | 0.803 | 0.910 | 1.217 | 1.131 |
| | 0.081 | 0.221 | 0.374 | 0.613 | 0.987 | 1.050 | 1.314 | 1.080 |
| WV-8690 | 0.199 | 0.388 | 0.503 | 0.808 | 0.897 | 1.000 | 1.148 | 1.068 |
| | 0.208 | 0.313 | 0.754 | 0.932 | 1.058 | 1.236 | 1.286 | 1.138 |
| WV-8858 | 0.233 | 0.446 | 0.595 | 0.838 | 0.911 | 0.916 | 0.965 | 1.213 |
| | 0.240 | 0.340 | 0.727 | 1.036 | 1.039 | 1.403 | 0.874 | |
| WV-8859 | 0.086 | 0.292 | 0.279 | 0.710 | 0.850 | 1.071 | 0.956 | 1.091 |
| | 0.083 | 0.217 | 0.505 | 0.754 | 0.981 | 1.258 | 1.131 | 1.454 |
| WV-8860 | 0.234 | 0.386 | 0.385 | 0.751 | 0.867 | 0.947 | 1.358 | 1.057 |
| | 0.162 | 0.321 | 0.503 | 1.002 | 1.100 | 1.075 | 1.250 | 1.241 |

TABLE 92
Activity of oligonucleotides.

| | 1.477 | 1.079 | 0.681 | 0.283 | −0.115 | −0.513 | −0.911 | −1.308 |
|---|---|---|---|---|---|---|---|---|
| WV-7807 | 0.102 | 0.331 | 0.588 | 0.790 | 1.037 | 0.989 | 1.271 | 1.147 |
| | 0.137 | 0.397 | 0.453 | 0.814 | 1.160 | 1.099 | 1.257 | 1.027 |
| WV-8854 | 0.117 | 0.375 | 0.678 | 0.831 | 0.962 | 1.021 | 1.258 | 1.277 |
| | 0.112 | 0.363 | 0.559 | 0.793 | 1.134 | 1.237 | 1.226 | 1.186 |
| WV-8855 | 0.174 | 0.553 | 0.745 | 0.873 | 0.890 | 0.968 | 0.954 | 1.088 |
| | 0.181 | 0.462 | 0.690 | 0.737 | 1.102 | 1.168 | 0.930 | 1.006 |
| WV-8856 | 0.055 | 0.239 | 0.496 | 0.779 | 0.815 | 0.937 | 1.029 | 1.027 |
| | 0.069 | 0.288 | 0.654 | 0.884 | 1.172 | 1.146 | 0.937 | 1.222 |
| WV-8857 | 0.237 | 0.445 | 0.967 | 0.928 | 0.976 | 0.790 | 0.992 | 1.119 |
| | 0.188 | 0.504 | 0.783 | 0.932 | 1.031 | 1.046 | 1.086 | 1.067 |

TABLE 93
Activity of oligonucleotides.

| | 1.477 | 1.079 | 0.681 | 0.283 | −0.114 | −0.512 | −0.910 | −1.308 |
|---|---|---|---|---|---|---|---|---|
| WV-7806 | 0.15 | 0.24 | 0.29 | 0.71 | 0.92 | 1.03 | 1.02 | 1.10 |
| | 0.14 | 0.16 | 0.30 | 0.56 | 0.67 | 0.84 | 1.02 | 0.89 |
| WV-8850 | 0.57 | 0.61 | 0.59 | 1.09 | 1.08 | 1.04 | 1.11 | 1.29 |
| | 0.44 | 0.52 | 0.60 | 0.65 | 0.81 | 0.76 | 0.96 | 0.93 |
| WV-8851 | 0.18 | 0.41 | 0.43 | 0.95 | 0.93 | 1.00 | 1.08 | 1.05 |
| | 0.17 | 0.27 | 0.63 | 0.71 | 0.70 | 1.01 | 0.90 | 0.85 |
| WV-8852 | 0.55 | 0.29 | 0.32 | 0.83 | 1.04 | 1.23 | 0.90 | 1.28 |
| | 0.14 | 0.18 | 0.26 | 0.49 | 0.77 | 0.83 | 1.09 | 0.92 |
| WV-8853 | 0.21 | 0.38 | 0.41 | 0.76 | 1.24 | 0.92 | 1.08 | 0.93 |
| | 0.13 | 0.20 | 0.44 | 0.61 | 0.94 | 0.64 | 0.87 | 0.95 |

TABLE 94
Activity of oligonucleotides.

| | 1.477 | 1.079 | 0.681 | 0.283 | −0.114 | −0.512 | −0.910 | −1.308 |
|---|---|---|---|---|---|---|---|---|
| WV-7805 | 0.29 | 0.33 | 0.44 | 0.72 | 0.95 | 0.96 | 0.93 | 0.99 |
| | 0.15 | 0.27 | 0.41 | 0.73 | 1.12 | 1.19 | 0.78 | 0.87 |
| WV-8609 | 0.33 | 0.37 | 0.48 | 0.90 | 0.84 | 0.81 | 1.02 | 1.04 |
| | 0.13 | 0.29 | 0.56 | 0.76 | 0.89 | 1.15 | 1.07 | 0.91 |
| WV-8847 | 0.24 | 0.37 | 0.58 | 0.78 | 0.89 | 1.20 | 0.91 | 0.97 |
| | 0.14 | 0.23 | 0.64 | 0.79 | 0.90 | 1.16 | 0.94 | 1.19 |
| WV-8848 | 0.19 | 0.32 | 0.47 | 0.69 | 0.93 | 0.88 | 0.92 | 0.92 |
| | 0.19 | 0.16 | 0.46 | 0.74 | 0.88 | 0.79 | 1.03 | 1.09 |
| WV-8849 | 0.24 | 0.39 | 0.55 | 0.79 | 1.17 | 0.97 | 1.16 | 0.95 |
| | 0.28 | 0.29 | 0.54 | 0.82 | 1.05 | 1.13 | 1.17 | 1.05 |

TABLE 95

| | 1.477 | 1.079 | 0.681 | 0.283 | −0.114 | −0.512 | −0.910 | −1.308 |
|---|---|---|---|---|---|---|---|---|
| WV-7804 | 0.29 | 0.37 | 0.51 | 0.81 | 0.85 | 1.16 | 0.87 | 0.89 |
| | 0.19 | 0.22 | 0.47 | 0.82 | 0.85 | 0.94 | 1.05 | 1.06 |
| WV-8843 | 0.53 | 0.72 | 0.62 | 1.00 | 0.98 | 0.85 | 0.92 | 0.98 |
| | 0.45 | 0.51 | 0.61 | 0.93 | 0.93 | 1.01 | 0.90 | 1.01 |
| WV-8844 | 0.25 | 0.44 | 0.58 | 0.78 | 0.71 | 0.86 | 0.86 | 1.00 |
| | 0.22 | 0.21 | 0.48 | 0.76 | 1.02 | 1.06 | 0.74 | 1.16 |
| WV-8845 | 0.23 | 0.42 | 0.52 | 0.82 | 0.99 | 0.87 | 0.77 | 1.11 |
| | 0.17 | 0.25 | 0.44 | 0.76 | 0.90 | 0.97 | 0.99 | 0.88 |
| WV-8846 | 0.20 | 0.38 | 0.55 | 0.60 | 0.90 | 0.76 | 0.88 | 0.98 |
| | 0.17 | 0.25 | 0.39 | 0.71 | 1.11 | 0.92 | 0.83 | 1.04 |

TABLE 98
Activity of oligonucleotides.
10 nM.

| | Hep3B | | Huh7 | |
|---|---|---|---|---|
| mock | 100 | 100 | 100 | 100 |
| WV-7794 | 47.6 | 44.5 | 25.0 | 20.6 |
| WV-7795 | 58.5 | 52.8 | 14.3 | 14.8 |
| WV-7796 | 54.6 | 56.4 | 16.3 | 15.5 |
| WV-7797 | 75.1 | 74.2 | 13.5 | 12.8 |
| WV-7798 | 78.4 | 79.8 | 11.9 | 13.7 |
| WV-7799 | 89.9 | 92.4 | 23.5 | 25.7 |
| WV-7800 | 93.6 | 92.2 | 34.1 | 29.9 |
| WV-7801 | 90.3 | 90.3 | 38.4 | 29.3 |
| WV-7802 | 101.1 | 101.3 | 25.1 | 29.6 |
| WV-7803 | 102.0 | 103.2 | 24.8 | 25.8 |
| WV-7804 | 95.9 | 97.2 | 27.8 | 32.7 |
| WV-7805 | 100.5 | 95.5 | 21.9 | 22.0 |
| WV-7806 | 110.6 | 105.4 | 22.0 | 21.2 |
| WV-7807 | 96.2 | 101.5 | 21.1 | 23.8 |
| WV-7808 | 95.5 | 101.0 | 21.5 | 18.8 |
| WV-7809 | 85.3 | 84.2 | 17.1 | 15.7 |
| WV-7810 | 92.0 | 95.9 | 25.2 | 21.6 |
| WV-7811 | 100.1 | 100.0 | 26.6 | 27.1 |
| WV-7812 | 79.5 | 82.1 | 22.3 | 21.1 |
| WV-7813 | 83.7 | 76.2 | 23.7 | 18.2 |
| WV-7814 | 87.8 | 82.8 | 44.3 | 39.2 |
| WV-7815 | 78.1 | 74.8 | 45.3 | 37.1 |
| WV-7816 | 59.5 | 52.4 | 24.5 | 20.5 |

TABLE 99
Activity of oligonucleotides.
10 nM.

| | Hep3B | | Huh7 | |
|---|---|---|---|---|
| mock | 100 | 100 | 100 | 100 |
| WV-7778 | 92.8 | 86.9 | 63.6 | 52.7 |
| WV-7779 | 92.6 | 85.8 | 59.2 | 48.0 |
| WV-7780 | 102.3 | 97.1 | 36.4 | 34.8 |
| WV-7781 | 111.8 | 102.4 | 46.1 | 38.9 |
| WV-7782 | 108.5 | 94.7 | 43.3 | 35.0 |
| WV-7783 | 110.2 | 97.5 | 36.6 | 33.7 |
| WV-7784 | 105.0 | 95.9 | 41.2 | 41.9 |
| WV-7785 | 108.7 | 107.4 | 73.8 | 57.5 |
| WV-3858 | 103.3 | 103.6 | 55.1 | 52.3 |
| WV-3859 | 94.7 | 96.1 | 41.8 | 41.2 |
| WV-3860 | 104.2 | 94.1 | 46.7 | 45.6 |
| WV-3861 | 101.8 | 99.2 | 47.1 | 45.2 |
| WV-3862 | 97.1 | 96.5 | 44.0 | 42.3 |
| WV-3863 | 99.7 | 86.0 | 42.0 | 51.5 |
| WV-3864 | 97.8 | 96.8 | 53.5 | 38.9 |
| WV-7786 | 99.1 | 104.3 | 37.0 | 38.0 |
| WV-7787 | 84.2 | 87.5 | 23.0 | 25.1 |
| WV-7788 | 80.4 | 88.0 | 35.5 | 28.5 |
| WV-7789 | 82.7 | 85.7 | 25.4 | 25.5 |
| WV-7790 | 80.8 | 85.1 | 27.4 | 29.8 |
| WV-7791 | 87.1 | 80.1 | 40.8 | 42.1 |
| WV-7792 | 78.1 | 73.1 | 42.5 | 46.5 |
| WV-7793 | 68.3 | 65.1 | 49.9 | 44.9 |

TABLE 100
Activity of oligonucleotides.
% mRNA remaining
(RhPNPLA3/hSFRS9)
Monkey hepatocytes at 48 hrs.

| | 10 nM | | 3 nM | | 1 nM | |
|---|---|---|---|---|---|---|
| Mock | 100 | 100 | 100 | 100 | 100 | 100 |
| WV-3421 | 28.7 | 35.4 | 44.6 | 31.8 | 61.3 | 53.8 |
| WV-7794 | 64.1 | 74.4 | 104.3 | 96.2 | 115.5 | 121.3 |
| WV-7795 | 80.8 | 88.4 | 130.2 | 115.9 | 109.0 | 130.0 |
| WV-7796 | 51.3 | 53.4 | 83.8 | 95.5 | 106.9 | 103.3 |
| WV-7797 | 51.4 | 48.5 | 97.3 | 81.4 | 115.1 | 126.7 |
| WV-7798 | 65.2 | 56.8 | 84.8 | 86.8 | 106.8 | 104.0 |
| WV-7799 | 96.5 | 102.5 | 104.7 | 117.6 | 108.9 | 129.6 |
| WV-7800 | 66.1 | 78.8 | 113.3 | 111.3 | 114.9 | 128.1 |
| WV-7801 | 113.1 | 117.7 | 116.0 | 112.7 | 113.3 | 118.5 |
| WV-7802 | 101.6 | 110.7 | 105.8 | 120.3 | 113.3 | 123.9 |
| WV-7803 | 52.5 | 59.6 | 73.6 | 79.4 | 106.5 | 129.4 |
| WV-7804 | 95.5 | 91.3 | 111.3 | 137.4 | 116.5 | 122.1 |
| WV-7805 | 84.7 | 97.8 | 111.7 | 111.1 | 114.3 | 118.7 |
| WV-7806 | 91.2 | 87.2 | 129.7 | 121.3 | 124.8 | 121.8 |
| WV-7807 | 64.5 | 89.2 | 108.5 | 119.7 | 108.6 | 123.7 |
| WV-7808 | 39.4 | 48.1 | 94.7 | 105.8 | 105.1 | 125.5 |
| WV-7809 | 46.5 | 36.8 | 77.0 | 64.9 | 85.1 | 101.2 |
| WV-7810 | 46.7 | 46.5 | 62.1 | 78.5 | 75.8 | 94.7 |
| WV-7811 | 70.4 | 78.7 | 88.2 | 84.0 | 101.1 | 96.6 |
| WV-7812 | 47.2 | 53.3 | 74.5 | 80.7 | 97.7 | 77.8 |
| WV-7813 | 43.0 | 38.3 | 76.5 | 71.2 | 97.0 | 89.7 |
| WV-7814 | 49.8 | 51.2 | 102.8 | 96.1 | 105.9 | 131.8 |
| WV-7815 | 56.0 | 52.5 | 88.3 | 83.8 | 83.4 | 94.9 |
| WV-7816 | 29.3 | 19.7 | 51.5 | 57.5 | 84.4 | 68.4 |

TABLE 101
Activity of oligonucleotides.
PNPLA3 mRNA Level
(PNPLA3/GAPDH)

| | 0.12 nM | 0.4 nM | 1.1. nM |
|---|---|---|---|
| WV-993 | 99.8 | 77.9 | 74.5 |
| WV-3421 | 74.9 | 44.6 | 24.0 |
| WV-7805 | 105.4 | 99.2 | 83.8 |
| WV-9890 | 108.6 | 78.4 | 78.3 |
| WV-12100 | 104.6 | 102.7 | 93.2 |
| WV-9893 | 93.7 | 103.8 | 79.8 |
| WV-12101 | 124.1 | 67.6 | 36.6 |

TABLE 102A
Activity of oligonucleotides.
Primary cyno hepatocytes.

| Conc. (nM) | WV-9893 | | WV-3421 | | WV-2101 | |
|---|---|---|---|---|---|---|
| 1.079181 | 116.7 | 90.2 | 13.6 | 6.5 | 20.1 | 27.6 |
| 0.681241 | 135.5 | 98.9 | 13.9 | 5.4 | 20.1 | |
| 0.283301 | 86.5 | 126.1 | 32.9 | 23.7 | 11.0 | 37.7 |
| −0.11464 | 105.3 | 108.9 | 70.7 | 46.7 | 40.7 | |
| −0.51258 | 121.9 | 114.1 | 89.3 | 81.5 | 70.0 | 97.1 |
| −0.91052 | 112.7 | 137.8 | 124.2 | 113.7 | 81.7 | 114.1 |
| −1.30846 | 116.0 | 110.1 | 134.7 | 80.5 | 81.0 | 72.6 |
| −1.7064 | 120.5 | 106.7 | 105.7 | 140.0 | 82.5 | 77.1 |
| −2.10434 | 120.5 | 108.0 | 131.0 | 95.2 | 98.4 | 88.2 |
| −2.50228 | 94.8 | 99.6 | 89.2 | 85.4 | 106.7 | 89.7 |

[1774] The Tm of various oligonucleotides was measured while in duplex with a RNA which was completely complementary, or which was completely complementary except for two mismatches (representing the mutant allele). Conditions used were: 1 μM Duplex in 1×PBS (pH 7.2); Temperature Range: 15° C.-90° C.; Temperature Rate: 0.5° C./min; Measurement Interval: 0.5° C.

TABLE 102B
Tm of oligonucleotides.

| | | Duplex | Duplex | |
|---|---|---|---|---|
| | | Tm (° C.) | Tm (° C.) | Δ difference |
| | | WV-12420 | WV-12421 | Full match vs |
| ASO | Length | Full match | Two mismatches | two mismatches |
| WV-7805 | 20-mer | 63.52 | 47.62 | 15.9 |
| WV-9891 | 20-mer | 61.62 | 44.77 | 16.9 |
| WV-9890 | 20-mer | 61.57 | 46.67 | 14.9 |
| WV-9893 | 20-mer | 58.67 | 43.52 | 15.2 |
| WV-12106 | 24-mer | 71.52 | 59.72 | 11.8 |
| WV-12107 | 24-mer | 69.57 | 57.77 | 11.8 |
| WV-12100 | 24-mer | 70.77 | 59.57 | 11.2 |
| WV-12101 | 24-mer | 67.52 | 56.62 | 10.9 |

TABLE 103
Activity of oligonucleotides.
Huh7 cells.

| Conc. (nM) | 1 | 0.52288 | 0.04576 | −0.4314 | −0.9085 | −1.3856 | −1.8627 |
|---|---|---|---|---|---|---|---|
| WV-7805 | 7.0 | 23.5 | 64.7 | 80.4 | 88.2 | 92.5 | 99.5 |
| | 5.1 | 24.7 | 78.9 | 74.1 | 86.7 | | |
| WV-9890 | 1.6 | 35.0 | | 90.4 | 90.3 | 92.6 | 104.6 |
| | 13.1 | 29.2 | 73.7 | 88.5 | 87.1 | 95.8 | 105.5 |
| WV-12100 | 12.4 | 33.8 | 63.6 | 90.6 | | 102.3 | 101.5 |
| | 10.2 | 27.6 | 76.6 | 80.0 | 83.6 | 80.7 | 85.0 |
| WV-9893 | 10.4 | 28.7 | 74.3 | 86.3 | 87.7 | 116.1 | 93.8 |
| | 4.3 | 36.4 | 80.4 | 91.5 | 110.3 | 108.6 | 106.5 |
| WV-12101 | | 4.6 | 19.8 | 60.3 | 85.8 | 92.0 | 108.3 |
| | | 6.8 | 19.2 | 60.0 | 81.1 | 81.0 | 85.6 |

TABLE 104
Activity of oligonucleotides.
nM

| Conc. (nM) | 50 | 20 | 8 | 3.2 | 1.28 | 0.51 | 0.20 | 0.081 | 0.032 | 0.013 |
|---|---|---|---|---|---|---|---|---|---|---|
| WV-7850 | 39.0 | 65.8 | 93.0 | 91.3 | 111.1 | 106.1 | 84.6 | 97.3 | 88.8 | 92.0 |
| Hep3B | 43.1 | 72.5 | 82.9 | 86.6 | 94.4 | 87.3 | 87.7 | 89.1 | 89.1 | 92.5 |
| WV-7851 | 38.2 | 81.0 | 93.6 | 90.5 | 98.6 | 94.6 | 100.1 | 90.2 | 96.1 | 100.6 |
| Hep3B | 54.3 | 84.1 | 96.1 | 94.4 | 93.0 | 94.1 | 99.5 | 87.1 | 101.9 | 92.8 |
| WV-7852 | 34.9 | 69.7 | 89.5 | 97.3 | 90.0 | 96.8 | 111.5 | 92.1 | 96.1 | 98.9 |
| Hep3B | 44.6 | 74.9 | 101.3 | 91.8 | 111.3 | 95.8 | 99.8 | 100.6 | 95.8 | 109.5 |
| WV-7853 | 28.3 | 66.4 | 85.2 | | 96.3 | 109.2 | 95.1 | 95.9 | 95.6 | 99.1 |
| Hep3B | 29.8 | 50.5 | 81.3 | 96.1 | 97.1 | 105.3 | 94.0 | 104.8 | 95.8 | 97.4 |
| WV-7854 | 16.7 | 63.0 | 82.3 | 92.8 | 90.6 | 88.3 | 89.7 | 95.2 | 99.4 | 88.0 |
| Hep3B | 18.8 | 59.9 | 80.7 | 89.4 | 84.0 | 86.6 | 88.9 | 89.4 | 94.3 | 96.5 |
| WV-7850 | 2.7 | 5.3 | 11.7 | 25.1 | 57.3 | 75.2 | 71.2 | 84.7 | 80.7 | 96.8 |
| Huh7 | 4.3 | 5.9 | 9.7 | 13.8 | 62.5 | 73.3 | 74.3 | 75.8 | 93.7 | 104.2 |
| WV-7851 | 2.1 | 6.1 | 1.1 | 31.5 | 55.2 | 81.7 | 91.8 | 91.0 | 84.3 | 86.9 |
| Huh7 | 1.3 | 4.6 | 14.9 | 25.9 | 52.3 | 81.7 | 95.0 | 79.6 | 79.5 | 81.4 |
| WV-7852 | 8.4 | 7.8 | 10.0 | 28.6 | 50.0 | 72.8 | 82.6 | 96.2 | 72.2 | 94.1 |
| Huh7 | 7.4 | 5.8 | 10.6 | 25.4 | 56.1 | 87.6 | 85.1 | 83.7 | 70.1 | 88.5 |
| WV-7853 | 2.9 | 5.4 | 6.4 | 27.1 | 47.8 | 70.1 | 96.0 | 82.7 | 89.4 | 86.3 |
| Huh7 | 3.8 | 4.3 | 8.5 | 23.8 | 62.2 | 93.8 | 74.6 | 90.4 | 93.4 | 95.8 |
| WV-7854 | 0.6 | 2.4 | 9.9 | 23.5 | 47.7 | 76.6 | 84.1 | 79.3 | 89.4 | 98.8 |
| Huh7 | 5.4 | 7.5 | 10.3 | 22.2 | 45.9 | 66.5 | 72.7 | 82.7 | 83.7 | 96.6 |

TABLE 105
Activity of oligonucleotides.

| nM | 50 | 20 | 8 | 3.2 | 1.28 | 0.51 | 0.204 | 0.081 | 0.032 | 0.013 |
|---|---|---|---|---|---|---|---|---|---|---|
| WV-7827 | 37.0 | 79.1 | 97.3 | 94.2 | 97.0 | 105.3 | 107.2 | 100.9 | 98.8 | 96.8 |
| Hep3B | 34.3 | 85.1 | 89.9 | 89.1 | 95.4 | 93.1 | 97.4 | 101.7 | 95.8 | 93.4 |
| WV-7828 | 37.0 | 85.9 | 93.5 | 97.6 | 94.2 | 97.3 | 92.0 | 94.4 | 92.8 | 92.9 |
| Hep3B | 32.8 | 77.2 | 91.8 | 90.6 | 88.8 | 96.7 | 91.7 | 89.0 | 92.8 | 90.3 |
| WV-7829 | 25.1 | 82.2 | 99.7 | 92.6 | 93.6 | 95.8 | 103.8 | 94.0 | 91.5 | 86.3 |
| Hep3B | 33.5 | 79.8 | 98.8 | 92.4 | 94.1 | 104.0 | 102.3 | 105.6 | 103.1 | 104.3 |
| WV-7830 | 36.8 | 79.3 | 97.9 | | 100.2 | 107.3 | 104.6 | 95.0 | 97.7 | 96.7 |
| Hep3B | 54.2 | 87.6 | 97.8 | 104.6 | 113.1 | 109.9 | 100.8 | 110.1 | 93.5 | 98.6 |
| WV-7831 | 53.4 | 97.4 | 103.9 | 104.8 | 99.8 | 102.6 | 111.8 | 102.0 | 93.5 | 101.5 |
| Hep3B | 62.5 | 92.9 | 103.7 | 99.5 | 102.9 | 99.8 | 98.9 | 93.6 | 101.8 | 100.8 |
| WV-7827 | 3.8 | 6.3 | 13.5 | 34.1 | 57.9 | 80.6 | 71.9 | 74.4 | 77.6 | 77.5 |
| Huh7 | 3.0 | 5.8 | 13.4 | 44.1 | 67.2 | 87.3 | 84.7 | 76.1 | 80.6 | 74.0 |
| WV-7828 | 2.3 | 16.3 | 9.8 | 31.4 | 63.3 | 83.2 | 74.9 | 82.3 | 89.1 | 83.1 |
| Huh7 | 1.5 | 9.1 | 25.0 | 31.5 | 69.3 | 75.8 | 76.5 | 87.0 | 90.0 | 79.8 |
| WV-7829 | 5.6 | 16.4 | 31.1 | 54.2 | 78.3 | 94.1 | 87.1 | 97.4 | 108.4 | 100.6 |
| Huh7 | 7.2 | 9.3 | 18.6 | 31.5 | 65.7 | 76.0 | 90.6 | 87.5 | 81.9 | 89.0 |
| WV-7830 | 4.1 | 6.3 | 12.5 | 35.3 | 56.8 | 86.4 | 80.1 | 95.7 | 86.7 | 94.2 |
| Huh7 | 5.5 | 5.9 | 17.0 | 40.2 | 76.3 | 77.5 | 79.8 | 98.6 | 93.2 | 85.8 |
| WV-7831 | 3.5 | 5.6 | 15.2 | 35.0 | 73.6 | 83.9 | 85.0 | 82.3 | 85.9 | 81.8 |
| Huh7 | 5.5 | 10.2 | 24.0 | 40.3 | 74.0 | 88.1 | 87.0 | 111.8 | 85.8 | 93.3 |

TABLE 106
Activity of oligonucleotides.

| nM | 50 | 20 | 8 | 3.2 | 1.28 | 0.51 | 0.204 | 0.081 | 0.032 | 0.013 |
|---|---|---|---|---|---|---|---|---|---|---|
| WV-7804 | 63.3 | 84.6 | 101.1 | 92.9 | 95.5 | 96.2 | 92.0 | 97.6 | 98.4 | 96.7 |
| Hep3B | 69.5 | 98.4 | 102.9 | 95.1 | 98.6 | 110.4 | 99.5 | 93.6 | 101.4 | 100.4 |
| WV-7805 | 60.3 | 81.8 | 96.9 | 90.7 | 91.3 | 95.5 | 90.5 | 92.2 | 98.5 | 95.0 |
| Hep3B | 62.7 | 86.1 | 98.5 | 98.1 | 97.0 | 97.9 | 100.7 | 107.6 | 104.0 | 105.8 |
| WV-7806 | 69.6 | 90.1 | 100.8 | 98.9 | 95.9 | 95.9 | 99.3 | 92.3 | 99.6 | 90.1 |
| Hep3B | 65.1 | 89.4 | 94.7 | 92.1 | 90.9 | 94.8 | 94.7 | 93.8 | 90.1 | 97.5 |
| WV-7807 | 75.0 | 95.3 | 101.2 | | 97.3 | 100.9 | 96.4 | 93.4 | 89.2 | 90.6 |
| Hep3B | 75.5 | 95.4 | 95.5 | 88.8 | 103.6 | 92.7 | 99.8 | 103.7 | 93.3 | 87.5 |
| WV-7808 | 72.2 | 98.9 | 117.8 | 109.5 | 116.3 | 110.9 | 109.3 | 116.8 | 111.1 | 104.6 |
| Hep3B | | | | | | | | | | |
| WV-7804 | 4.4 | 3.5 | 25.1 | 45.3 | 68.9 | 74.6 | 73.6 | 82.9 | 81.8 | 86.7 |
| Huh7 | 7.5 | 11.1 | 23.3 | 48.0 | 77.1 | 76.0 | 86.5 | 89.4 | 96.1 | 90.4 |
| WV-7805 | 1.7 | 7.1 | 19.6 | 36.1 | 59.2 | 75.3 | 69.8 | 75.0 | 78.0 | 79.6 |
| Huh7 | 8.4 | 11.9 | 11.6 | 38.4 | 76.2 | 78.4 | 81.1 | 86.9 | 95.8 | 95.0 |
| WV-7806 | 9.8 | 2.8 | 13.8 | 28.8 | 68.7 | 66.6 | 69.7 | 78.6 | 89.4 | 88.6 |
| Huh7 | 3.8 | 7.2 | 12.5 | 39.7 | 68.5 | 82.4 | 80.3 | 79.7 | 87.3 | 98.0 |
| WV-7807 | 3.0 | 12.6 | 25.1 | 46.9 | 78.0 | 85.3 | 98.8 | 92.6 | 85.6 | 85.5 |
| Huh7 | 3.9 | 9.1 | 14.9 | 41.5 | 70.4 | 73.7 | 68.5 | 75.3 | 81.9 | 94.7 |
| WV-7808 | 1.8 | 1.9 | 14.2 | 37.1 | 63.6 | 71.0 | 79.2 | 88.0 | 84.1 | 95.3 |
| Huh7 | 1.4 | 5.2 | 9.1 | 33.2 | 65.2 | 77.4 | 92.3 | 71.2 | 83.5 | 78.1 |

TABLE 107
Activity of oligonucleotides.

| nM | WV-7805 Hep3B | | WV-7805 Huh7 | |
|---|---|---|---|---|
| 20 | 81.8 | 86.1 | 7.1 | 11.9 |
| 8 | 96.9 | 98.5 | 19.6 | 11.6 |
| 3.2 | 90.7 | 98.1 | 36.1 | 38.4 |
| 1.28 | 91.3 | 97.0 | 59.2 | 76.2 |
| 0.512 | 95.5 | 97.9 | 75.3 | 78.4 |
| 0.2048 | 90.5 | 100.7 | 69.8 | 81.1 |
| 0.08192 | 92.2 | 107.6 | 75.0 | 86.9 |
| 0.032768 | 98.5 | 104.0 | 78.0 | 95.8 |
| 0.013107 | 95.0 | 105.8 | 79.6 | 95.0 |

[1775] In some tests of PNPLA3 oligonucleotides, APOC3 oligonucleotide WV-1868 (which targets APOC3, a gene different than PNPLA2) is used as a negative control.

TABLE 108
Activity of oligonucleotides.

| nM | 2 | | 8.25 | | 33 | |
|---|---|---|---|---|---|---|
| Control | 1.002 | 1.082 | 1.192 | 1.105 | 1.031 | 1.038 |
| WV-1868 | 1.105 | 1.016 | 1.120 | 0.995 | 1.023 | 1.023 |
| WV-3451 | 0.962 | 0.975 | 0.484 | 0.617 | 0.218 | 0.256 |
| WV-3452 | 1.060 | 0.948 | 0.526 | 0.505 | 0.189 | 0.172 |
| WV-3453 | 0.388 | 0.487 | 0.181 | 0.197 | 0.217 | 0.156 |
| WV-3454 | 0.509 | 0.502 | 0.260 | 0.186 | 0.138 | 0.064 |
| WV-3455 | 0.613 | 0.617 | 0.342 | 0.347 | 0.197 | 0.155 |
| WV-3456 | 0.724 | 0.843 | 0.468 | 0.545 | 0.218 | 0.223 |
| WV-3457 | 0.714 | 0.776 | 0.367 | 0.362 | 0.132 | 0.096 |
| WV-3458 | 0.672 | 0.618 | 0.251 | 0.309 | 0.256 | 0.180 |
| WV-3459 | 1.184 | 1.105 | 1.097 | 1.067 | 0.820 | 0.975 |
| WV-3460 | 0.849 | 0.689 | 0.436 | 0.367 | 0.461 | 0.382 |
| WV-3461 | 0.989 | 1.243 | 0.471 | 0.600 | 0.261 | 0.198 |
| WV-3462 | 0.833 | 1.040 | 0.417 | 0.446 | 0.286 | 0.120 |
| | 2 | | 8.25 | | 33 | |
| Control | 1.002 | 1.082 | 1.192 | 1.105 | 1.031 | 1.038 |
| WV-1868 | 1.105 | 1.016 | 1.120 | 0.995 | 1.023 | 1.023 |
| WV-3437 | 1.045 | 1.067 | 0.564 | 0.501 | 0.256 | 0.181 |
| WV-3438 | 0.861 | 0.989 | 0.935 | 0.760 | 1.009 | 0.982 |
| WV-3439 | 1.009 | 1.016 | 0.770 | 0.734 | 0.576 | 0.530 |
| WV-3440 | | 1.038 | 1.060 | 0.982 | 0.729 | 0.613 |
| WV-3441 | 1.082 | 1.234 | 0.680 | 0.903 | 0.313 | 0.433 |
| WV-3442 | 1.120 | 0.935 | 0.477 | 0.643 | 0.223 | 0.347 |
| WV-3443 | 0.477 | 0.410 | 0.278 | 0.204 | 0.229 | 0.171 |
| WV-3444 | 0.714 | 0.592 | 0.350 | 0.396 | 0.234 | 0.209 |
| WV-3445 | 1.304 | 1.060 | 0.776 | 0.760 | 0.439 | 0.388 |
| WV-3446 | 0.849 | 0.729 | 0.455 | 0.430 | 0.247 | 0.235 |
| WV-3447 | 0.786 | 0.929 | 0.568 | 0.604 | 0.201 | 0.292 |
| WV-3448 | 0.776 | 0.837 | 0.458 | 0.568 | 0.218 | 0.226 |
| WV-3449 | 0.776 | 0.704 | 0.404 | 0.449 | 0.252 | 0.130 |
| WV-3450 | 1.084 | 0.851 | 1.077 | 0.839 | 0.924 | 0.905 |
| | 2 | | 8.25 | | 33 | |
| Control | 1.002 | 1.082 | 1.192 | 1.105 | 1.031 | 1.038 |
| WV-1868 | 1.105 | 1.016 | 1.120 | 0.995 | 1.023 | 1.023 |
| WV-3423 | 0.634 | 0.600 | 0.407 | 0.419 | 0.315 | 0.280 |
| WV-3424 | 0.634 | 0.754 | 0.350 | 0.445 | 0.124 | 0.286 |
| WV-3425 | 1.002 | 1.023 | 0.729 | 0.643 | 0.347 | 0.345 |
| WV-3426 | 1.023 | 0.797 | 0.487 | 0.427 | 0.364 | 0.367 |
| WV-3427 | 0.849 | 0.897 | 0.709 | 0.781 | 0.621 | 0.572 |
| WV-3428 | 1.052 | 1.089 | 0.831 | 0.922 | 0.942 | 1.002 |
| WV-3429 | 1.060 | 0.982 | 0.588 | 0.604 | 0.401 | 0.340 |
| WV-3430 | 1.074 | 1.184 | 0.935 | 0.942 | 0.505 | 0.449 |
| WV-3431 | 0.600 | 0.675 | 0.391 | 0.364 | 0.208 | 0.237 |
| WV-3432 | 0.975 | 0.955 | 0.630 | 0.639 | 0.276 | 0.326 |
| WV-3433 | 0.596 | 0.685 | 0.240 | 0.270 | 0.215 | 0.146 |
| WV-3434 | 0.885 | 0.714 | 0.261 | 0.342 | 0.206 | 0.193 |
| WV-3435 | 0.584 | 0.584 | 0.350 | 0.311 | 0.288 | 0.261 |
| WV-3436 | 1.074 | 0.797 | 0.760 | 0.661 | 0.515 | 0.477 |
| | 2 | | 8.25 | | 33 | |
| Control | 0.910 | 1.000 | 0.996 | 1.136 | 1.105 | 1.136 |
| WV-1868 | 1.278 | 1.075 | 0.936 | 1.176 | 0.809 | 0.879 |
| WV-3409 | 0.690 | 0.498 | 0.329 | 0.274 | 0.488 | 0.405 |
| WV-3410 | 0.832 | 0.936 | 0.217 | 0.231 | 0.241 | 0.134 |
| WV-3411 | 0.685 | 0.588 | 0.114 | 0.116 | 0.037 | 0.108 |
| WV-3412 | | 0.873 | 0.383 | 0.286 | 0.089 | 0.070 |
| WV-3413 | 0.855 | 0.838 | 0.336 | 0.263 | 0.030 | 0.071 |
| WV-3414 | 1.105 | 1.024 | 0.798 | 0.709 | 0.290 | 0.333 |
| WV-3415 | 1.024 | | 0.298 | 0.185 | 0.484 | 0.393 |
| WV-3416 | 0.541 | 0.568 | 0.273 | 0.260 | 0.246 | 0.241 |
| WV-3417 | 0.734 | 0.622 | 0.331 | 0.137 | 0.298 | 0.300 |
| WV-3418 | 0.530 | 0.568 | 0.185 | 0.114 | 0.258 | 0.298 |
| WV-3419 | 0.962 | 0.639 | 0.680 | 0.588 | 0.377 | 0.362 |
| WV-3420 | | 1.113 | 0.956 | 0.771 | 0.375 | 0.159 |
| WV-3421 | 0.502 | 0.443 | 0.169 | 0.148 | 0.218 | 0.228 |
| WV-3422 | 0.923 | 1.083 | 0.680 | 0.516 | 0.365 | 0.372 |
| | 2 | | 8.25 | | 33 | |
| Control | 0.910 | 1.000 | 0.996 | 1.136 | 1.105 | 1.136 |
| WV-1868 | 1.278 | 1.075 | 0.936 | 1.176 | 0.809 | 0.879 |
| WV-3395 | 0.419 | 0.247 | 0.336 | 0.198 | 0.338 | 0.331 |
| WV-3396 | 1.024 | 0.982 | 0.452 | 0.553 | 0.249 | 0.195 |
| WV-3397 | 0.685 | 0.976 | 0.365 | | 0.182 | 0.096 |
| WV-3398 | 1.053 | | 0.159 | 0.273 | 0.061 | 0.052 |
| WV-3399 | 0.357 | 0.440 | 0.284 | 0.141 | 0.221 | 0.282 |
| WV-3400 | 0.867 | 0.861 | 0.553 | 0.458 | 0.184 | 0.160 |
| WV-3401 | 1.252 | 0.904 | 0.481 | 0.383 | 0.133 | 0.093 |
| WV-3402 | 0.437 | 0.302 | 0.122 | 0.096 | 0.070 | 0.046 |
| WV-3403 | 1.176 | 1.218 | 1.003 | 1.144 | 0.879 | 0.929 |
| WV-3404 | 0.195 | 0.367 | 0.155 | 0.135 | 0.269 | 0.215 |
| WV-3405 | 1.024 | 0.695 | 0.377 | 0.258 | 0.194 | 0.208 |
| WV-3406 | 1.287 | 1.075 | 1.314 | 1.201 | 1.314 | 0.969 |
| WV-3407 | 0.949 | 0.917 | 0.609 | 0.498 | 0.326 | 0.125 |
| WV-3408 | 0.239 | 0.360 | 0.107 | 0.187 | 0.265 | 0.161 |
| | 2 | | 8.25 | | 33 | |
| Control | 0.910 | 1.000 | 0.996 | 1.136 | 1.105 | 1.136 |
| WV-1868 | 1.278 | 1.075 | 0.936 | 1.176 | 0.809 | 0.879 |
| WV-3381 | 0.560 | 0.391 | 0.103 | 0.108 | 0.146 | 0.199 |
| WV-3382 | 0.949 | 1.024 | 0.393 | 0.271 | 0.132 | 0.211 |
| WV-3383 | 1.031 | 0.996 | 0.617 | 0.458 | 0.455 | 0.133 |
| WV-3384 | 1.252 | 1.060 | 0.402 | 0.416 | 0.136 | 0.133 |
| WV-3385 | 0.962 | 1.098 | 0.407 | 0.410 | 0.221 | 0.123 |
| WV-3386 | 0.680 | 0.440 | 0.186 | 0.246 | 0.265 | 0.176 |
| WV-3387 | 0.269 | 0.191 | 0.100 | 0.067 | 0.081 | 0.141 |
| WV-3388 | 1.168 | 0.982 | 0.849 | 1.053 | 1.168 | 0.892 |
| WV-3389 | 1.083 | 1.031 | 1.399 | 0.879 | 0.771 | 0.804 |
| WV-3390 | 0.676 | 0.580 | 0.226 | 0.265 | 0.035 | 0.051 |
| WV-3391 | 0.505 | 0.396 | 0.187 | 0.153 | 0.107 | 0.176 |
| WV-3392 | 0.462 | 0.362 | 0.139 | 0.116 | 0.093 | 0.070 |
| WV-3393 | 0.273 | 0.391 | 0.102 | 0.111 | 0.060 | 0.044 |
| WV-3394 | 0.509 | 0.405 | 0.263 | 0.133 | 0.109 | 0.097 |

TABLE 109A
Activity of oligonucleotides.

| Conc (nM) | 20 | 8 | 3.2 | 1.28 | 0.512 | 0.205 | 0.0819 | 0.0328 | 0.0131 | 0.0052 |
|---|---|---|---|---|---|---|---|---|---|---|
| WV-8148 | 111.7 | 111.5 | 102.6 | 105.8 | 102.9 | 103.1 | 92 | 96.5 | 99.6 | 118.7 |
| Hep3B | 97.3 | 114.3 | 107.8 | 106.6 | 105.8 | 106.6 | 90.9 | 100.8 | 95.3 | 105.5 |
| WV-8149 | 128.4 | 118 | 104.2 | 99.8 | 104.8 | 103.2 | 97.1 | 102.1 | 104.6 | 96.5 |
| Hep3B | 135.8 | 131.3 | 108.8 | 108.5 | 94.5 | 106.1 | 107.8 | 99.3 | 103.3 | 102.4 |
| WV-8150 | 120.7 | 123.7 | 115 | 99.8 | 98.6 | 100.9 | 88.5 | 92.3 | 103.1 | 102 |
| Hep3B | 113 | 111.8 | 98.4 | 102.1 | 102.3 | 100 | 103 | 100.8 | 104 | 107.9 |
| WV-8151 | 112.3 | 147 | 108.4 | 103.4 | 104.6 | 104.6 | 111.1 | 100.1 | 102.4 | 100 |
| Hep3B | 119.6 | 124.3 | 106.6 | 101.6 | 110.1 | 104.1 | 113.7 | 100.3 | 100.3 | 104.7 |
| WV-8152 | 119.1 | 139.2 | 113 | 107 | 112.7 | 121 | 112.4 | 111.7 | 88.5 | 114.7 |
| Hep3B | 133.7 | 149 | 118.1 | 103.2 | 101.7 | 101.8 | 102.5 | 94.6 | 98.3 | 104.2 |
| WV-8148 | 26.6 | 41.6 | 64.4 | 90.6 | 91.8 | 86.5 | 98.2 | 90.5 | 99.6 | 94.1 |
| Huh7 | 35.5 | 54 | 65.7 | 87.4 | 85.8 | 87.5 | 86.8 | 100.9 | 99.3 | 90.2 |
| WV-8149 | 23.2 | 33.1 | 64.6 | 83.6 | 87.2 | 94.4 | 82.9 | 94.8 | 79.1 | 92.5 |
| Huh7 | 27.5 | 44.3 | 65.5 | 89.5 | 84.5 | 87.9 | 82.9 | 92 | 94.6 | 85.1 |
| WV-8150 | 26.3 | 26.6 | 55 | 80.4 | 86.7 | 91.5 | 86.9 | 90.1 | 88.4 | 84.7 |
| Huh7 | 20 | 29.6 | 52.7 | 92.1 | 83.4 | 91.9 | 97 | 84 | 86.9 | 93.5 |
| WV-8151 | 13.4 | 28.7 | 59.7 | 82 | 90.6 | 92.4 | 90.2 | 84.4 | 78.1 | 85.7 |
| Huh7 | 23.6 | 32.8 | 63.6 | 77.7 | 101.1 | 92.6 | 91.6 | 100.9 | 83.4 | 90.2 |
| WV-8152 | 13.2 | 36.7 | 58.3 | 90.9 | 94.4 | 95.7 | 76.1 | 84.3 | 90.3 | 85.2 |
| Huh7 | 18.1 | 47.5 | 61 | 84.7 | 93.9 | 86.2 | 96 | 92.6 | 84 | 90.1 |
| nM | 20 | 8 | 3.2 | 1.28 | 0.512 | 0.205 | 0.0819 | 0.0328 | 0.0131 | 0.0052 |
| WV-8194 | 102.9 | 103.8 | 85.5 | 90.8 | 90.8 | 102.3 | 96.8 | 101.1 | 95.8 | 95.5 |
| Hep3B | 93.3 | 95.7 | 87.8 | 90 | 78.5 | 77.4 | 86.4 | 78.1 | 81 | 88.2 |
| WV-8195 | 107.9 | 103.7 | 96.6 | 91.5 | 91.7 | 92.1 | 94.1 | 105.6 | 107.4 | 95.7 |
| Hep3B | 123 | 101.5 | 92.9 | 89.4 | 92 | 86 | 88.3 | 101.9 | 104.3 | 99.3 |
| WV-8196 | 86.5 | 108.1 | 106 | 90.1 | 96.1 | 87.3 | 93.3 | 87.9 | 100.1 | 103.5 |
| Hep3B | 112.8 | 126.8 | 98.2 | 86.9 | 83.2 | 82.4 | 88.8 | 95.5 | 92.8 | 101.9 |
| WV-8197 | 140.8 | 123.5 | 108.9 | 87 | 91.5 | 92.8 | 106.1 | 98.1 | 107.7 | 94.5 |
| Hep3B | 143.8 | 132.1 | 98.1 | 85.6 | 85.3 | 80.7 | 84.6 | 88 | 95.2 | 93.5 |
| WV-8198 | 99.5 | 101 | 89.4 | 85.4 | 88.6 | 94.9 | 88.4 | 95.8 | 95 | 97.2 |
| Hep3B | 119.8 | 90.9 | 85.3 | 95.8 | 93.3 | 80.1 | 82.9 | 82.4 | 86.9 | 88 |
| WV-8194 | 8.1 | 13.3 | 32.2 | 69.5 | 91.6 | 100.4 | 89.2 | 91.8 | 90.4 | 81.5 |
| Huh7 | 7.4 | 31.2 | 38 | 76 | 86.9 | 93.6 | 92.5 | 92 | 87.5 | 104.3 |
| WV-8195 | 7.3 | 27 | 41.1 | 64.1 | 83.2 | 96.5 | 95.1 | 84.7 | 89.8 | 87.3 |
| Huh7 | 14 | 20 | 37.1 | 57.8 | 95 | 94.3 | 85.4 | 90.7 | 97.6 | 85.8 |
| WV-8196 | 8.9 | 19.5 | 26.7 | 64.4 | 78.5 | 88.3 | 83.2 | 88.1 | 81.1 | 81.1 |
| Huh7 | 14.3 | 19.9 | 37.1 | 57.3 | 91.7 | 91.8 | 88.5 | 84.5 | 84 | 91.9 |
| WV-8197 | 4.1 | 27.3 | 40.8 | 65.6 | 88.8 | 91.7 | 95.6 | 96 | 90.6 | 93.3 |
| Huh7 | 14.8 | 26.8 | 44 | 62.4 | 83.9 | 96.5 | 89.1 | 97.9 | 92.9 | 81.8 |
| WV-8198 | 7.9 | 19.9 | 36.5 | 68.6 | 94.6 | 90.6 | 90 | 94 | 90.9 | 89.9 |
| Huh7 | 6.9 | 26.7 | 47.9 | 63.8 | 83.1 | 99.5 | 97.2 | 97.1 | 88.1 | 97.8 |
| Conc (nM) | 20 | 8 | 3.2 | 1.28 | 0.512 | 0.205 | 0.0819 | 0.0328 | 0.0131 | 0.0052 |
| WV-8171 | 102.4 | 98.1 | 108.8 | 104.7 | 111.4 | 107.4 | 102.2 | 112 | 95.9 | 92.4 |
| Hep3B | 94.9 | 94.6 | 89.8 | 102.6 | 97.2 | 101.8 | 96.4 | 98.9 | 97.7 | 90.6 |
| WV-8172 | 105 | 105.3 | 116.3 | 108.9 | 120 | 105.5 | 101.4 | 100.9 | 94.3 | 99.9 |
| Hep3B | 92.8 | 90.5 | 92.7 | 90.1 | 96.8 | 90.6 | 97.9 | 92.5 | 96.7 | 84.7 |
| WV-8173 | 96.9 | 90.2 | 99.1 | 108.6 | 107.1 | 103.6 | 105.9 | 100.6 | 95.6 | 100.2 |
| Hep3B | 104.3 | 96.4 | 99 | 98.2 | 99.9 | 103.3 | 95.7 | 96.4 | 97.7 | 95.1 |
| WV-8174 | 98 | 85.2 | 93.3 | 96.1 | 83.8 | 84.7 | 83 | 86.3 | 93.7 | 105.9 |
| Hep3B | 115.5 | 112.5 | 95.7 | 98.7 | 86.6 | 97.4 | 93.6 | 82.7 | 90.4 | 99.2 |
| WV-8175 | 98.2 | 91 | 90.6 | 88 | 95.9 | 94.2 | 86.7 | 96 | 106.2 | 91.3 |
| Hep3B | 102.6 | 91.1 | 89.4 | 87.1 | 93.7 | 98.8 | 102.7 | 83.9 | 95.7 | 88.1 |
| WV-8171 | 22.1 | 39.4 | 56.7 | 76.8 | 76 | 87.5 | 75.8 | 95.2 | 83.1 | 77.8 |
| Huh7 | 19.2 | 58.8 | 66.5 | 77.9 | 89.6 | 88.9 | 93.8 | 91 | 90.8 | 97.2 |
| WV-8172 | 13.9 | 30 | 54.5 | 80.4 | 88.1 | 87.6 | 79.8 | 85.4 | 82 | 98.4 |
| Huh7 | 20.6 | 43.1 | 54.6 | 78.4 | 89.4 | 92.4 | 93.6 | 99.8 | 109.4 | 105.5 |
| WV-8173 | 37.2 | 44.1 | 78.6 | 106.3 | 113.7 | 106.6 | 105.3 | 103.7 | 97.6 | 93.3 |
| Huh7 | 41 | 75.8 | 85.6 | 100.6 | 111.3 | 103.2 | 114.4 | 117.5 | 107.3 | 107.7 |
| WV-8174 | 30.2 | 47.6 | 66.3 | 69.3 | 92.1 | 85.6 | 85.6 | 76.1 | 87.3 | 89.8 |
| Huh7 | 19 | 40.9 | 52.4 | 77.2 | 92.2 | 96.6 | 88.8 | 92 | 92.1 | 91.8 |
| WV-8175 | 11.5 | 26.5 | 45.9 | 69.1 | 86.1 | 85.6 | 82.6 | 92.9 | 97 | 83.7 |
| Huh7 | 12.5 | 26.7 | 45.2 | 77.6 | 86.4 | 94.5 | 102.9 | 91.7 | 92 | 85.9 |
| nM | 20 | 8 | 3.2 | 1.28 | 0.512 | 0.205 | 0.0819 | 0.0328 | 0.0131 | 0.0052 |
| WV-8217 | 88.4 | 85.5 | 87.5 | 86.9 | 89.2 | 90 | 98.6 | 98.5 | 97.1 | 86.5 |
| Hep3B | 93.3 | 83.5 | 76.7 | 80.1 | 78 | 77.9 | 77.6 | 74.8 | 79.8 | 86.6 |
| WV-8218 | 100.6 | 94.9 | 92 | 93.1 | 99.6 | 96 | 98.2 | 95.5 | 92.9 | 87.4 |
| Hep3B | 99.3 | 96.4 | 99.2 | 96.3 | 95.5 | 100.8 | 100.5 | 93.6 | 96.7 | 96.3 |
| WV-8219 | 147.3 | 128.9 | 107.6 | 106.1 | 104.8 | 106.8 | 98.6 | 101.5 | 96.5 | 110.7 |
| Hep3B | 126.8 | 103.2 | 94.8 | 93.5 | 94.2 | 96 | 100.6 | 103.3 | 96.7 | 102.9 |
| WV-8220 | 104.2 | 115.4 | 103.9 | 97 | 106.9 | 102.2 | 99.4 | 105.1 | 99.1 | 95.3 |
| Hep3B | 100 | 89.8 | 96.8 | 95.5 | 107.4 | 106.4 | 104.3 | 95.9 | 117 | 101 |
| WV- | 110.2 | 104.7 | 97.7 | 102.6 | 104.1 | 106.4 | 102.6 | 100.3 | 102 | 98.4 |
| 8221Hep3B | 94.5 | 98.5 | 101.6 | 99.7 | 99.4 | 108.4 | 103 | 107.1 | 100.3 | 103.3 |
| WV-8217 | 26.8 | 37.9 | 58.2 | 81.9 | 94 | 101.3 | 112 | 105.2 | 97.8 | 28.2 |
| Huh7 | 27.7 | 41 | 57.6 | 90.7 | 109.2 | 102.4 | 110.5 | 109.9 | 105.5 | 105.2 |
| WV-8218 | 21.6 | 45.8 | 56.1 | 77.7 | 86.9 | 97.3 | 82.6 | 88.5 | 86.1 | 73.9 |
| Huh7 | 20.9 | 28.8 | 55.3 | 78.1 | 106.9 | 107.3 | 107.6 | 95.6 | 104.1 | 82.8 |
| WV-8219 | 31.5 | 31 | 42.7 | 62.7 | 92 | 91.7 | 85.7 | 75.7 | 77.2 | 85.7 |
| Huh7 | 26 | 31.8 | 47.9 | 75 | 85.5 | 92.1 | 83.6 | 89.7 | 93.1 | 91.3 |
| WV-8220 | 4.8 | 16.3 | 31.8 | 66.1 | 78.6 | 77.8 | 79.7 | 71.7 | 81.1 | 80.3 |
| Huh7 | 11.8 | 30.1 | 54.4 | 77.4 | 105.6 | 98.6 | 90.5 | 85.7 | 93.9 | 85.5 |
| WV-8221 | 6.2 | 21.4 | 31.8 | 48.6 | 78.3 | 85.8 | 75.5 | 83.8 | 85.3 | 93 |
| Huh7 | 4.6 | 19.1 | 35.2 | 59.6 | 104.8 | 105.8 | 99.2 | 100.1 | 93.2 | 88.7 |

TABLE 109B
Activity of oligonucleotides.
IC50 in Huh7 cells (mutant allele):

| Oligonucleotide | IC50 (nM) | Oligonucleotide | IC50 (nM) |
|---|---|---|---|
| WV-8148 | 7.3 | WV-8197 | 3.2 |
| WV-8149 | 9.2 | WV-8198 | 3.5 |
| WV-8150 | 5.5 | WV-8217 | 5.4 |
| WV-8151 | 7.9 | WV-8218 | 5.9 |
| WV-8152 | 12.6 | WV-8219 | 3.1 |
| WV-8171 | 11.2 | WV-8220 | 5.5 |
| WV-8172 | 5.2 | WV-8221 | 2.6 |
| WV-8173 | 12 | WV-8194 | 3.5 |
| WV-8174 | 6.6 | WV-8195 | 3 |
| WV-8175 | 4.2 | WV-8196 | 2.8 |

TABLE 110
Activity of oligonucleotides.
Huh7 cells:

| | 50 | 20 | 8 | 3.2 | 1.28 | 0.512 | 0.204 | 0.081 | 0.032 | 0.013 |
|---|---|---|---|---|---|---|---|---|---|---|
| WV-3861 | 23.1 | 43.8 | 72.8 | 101.4 | 102.4 | 103.3 | 85.5 | 91.9 | 93.7 | 92.0 |
| | 30.1 | 52.2 | 89.3 | 103.4 | 95.9 | 93.4 | 99.4 | 104.5 | 89.7 | 104.8 |
| WV-7805 | 8.0 | 13.3 | 32.7 | 65.4 | 87.0 | 83.1 | 91.2 | 84.1 | 76.1 | 85.3 |
| | 10.1 | 22.7 | 49.1 | 82.1 | 87.8 | 81.8 | 82.5 | 77.8 | 87.9 | 79.1 |
| WV-7828 | 5.3 | 15.3 | 26.8 | 60.5 | 88.1 | 85.0 | 92.1 | 85.8 | 84.2 | 90.3 |
| | 4.3 | 10.0 | 41.1 | 54.4 | 79.6 | 90.2 | 89.0 | 90.2 | 99.3 | 83.6 |
| WV-7851 | 4.1 | 4.4 | 20.0 | 42.9 | 63.8 | 85.3 | 77.7 | 79.3 | 84.6 | 93.4 |
| | 6.7 | 6.6 | 20.3 | 47.5 | 86.7 | 79.7 | 97.4 | 97.4 | 85.0 | 89.4 |
| WV-8149 | 18.4 | 29.4 | 35.5 | 71.2 | 88.8 | 91.2 | 75.3 | 84.9 | 86.5 | 90.6 |
| | 46.2 | 21.9 | 47.2 | 80.7 | 86.5 | 93.9 | 83.9 | 90.5 | 101.4 | 95.3 |
| WV-8172 | 20.5 | 13.7 | 30.4 | 53.8 | 73.3 | 85.2 | 74.8 | 80.7 | 87.0 | 84.4 |
| | 20.3 | 21.9 | 41.3 | 59.0 | 78.7 | 83.5 | 91.1 | 92.5 | 91.8 | 104.3 |
| WV-8195 | 23.2 | 11.4 | 15.4 | 64.8 | 71.9 | 74.1 | 82.8 | 87.0 | 88.5 | 76.4 |
| | 22.7 | 14.6 | 23.5 | 62.1 | 80.2 | 85.0 | 99.0 | 99.6 | 104.0 | 100.4 |
| WV-8218 | 6.6 | 13.1 | 13.4 | 53.7 | 73.0 | 93.6 | 94.6 | 93.8 | 88.0 | 92.3 |
| | 20.2 | 14.0 | 30.6 | 57.7 | 97.4 | 117.6 | 99.8 | 101.2 | 114.2 | 109.0 |
| WV-3864 | 3.7 | 22.4 | 60.6 | 94.6 | 92.3 | 99.2 | 88.2 | 97.2 | 92.0 | 104.1 |
| | 18.9 | 27.5 | 68.5 | 114.8 | 95.1 | 113.1 | 100.1 | 117.6 | 110.2 | 118.9 |
| WV-7808 | 6.6 | 12.6 | 34.8 | 66.1 | 73.0 | 88.8 | 93.9 | 90.6 | 91.2 | 94.2 |
| | 6.4 | 14.2 | 32.3 | 80.2 | 106.0 | 106.7 | 107.6 | 89.2 | 103.4 | 97.6 |
| WV-7831 | 4.8 | 7.9 | 27.1 | 62.1 | 80.6 | 82.5 | 91.4 | 92.8 | 93.6 | 93.7 |
| | 8.0 | 13.1 | 29.4 | 62.2 | 90.7 | 122.5 | 105.5 | 120.7 | 115.5 | 97.9 |
| WV-7854 | 2.0 | 7.1 | 21.5 | 49.2 | 74.1 | 83.3 | 116.8 | 75.8 | 83.4 | 95.0 |
| | 5.0 | 5.3 | 17.0 | 50.4 | 100.7 | 99.7 | 103.2 | 99.8 | 101.7 | 90.1 |
| WV-8152 | | 14.4 | 33.7 | 80.7 | 82.8 | 80.8 | 84.3 | 86.5 | 89.7 | 88.2 |
| | | 23.4 | 40.1 | 77.3 | 106.3 | 96.3 | 97.7 | 99.9 | 97.1 | 79.5 |
| WV-8175 | 17.6 | 13.5 | 18.2 | 48.5 | 69.7 | 87.0 | 72.8 | 91.4 | 86.5 | 81.6 |
| | 22.4 | 16.5 | 19.2 | 51.1 | 108.5 | 89.7 | 87.4 | 102.0 | 91.2 | 95.4 |
| WV-8198 | 16.6 | 8.3 | 15.1 | 43.7 | 78.0 | 81.9 | 82.7 | 75.3 | 91.5 | 88.2 |
| | 7.1 | 5.1 | 23.9 | 46.3 | 93.6 | 103.2 | 103.6 | 93.8 | 125.9 | 96.0 |
| WV-8221 | 16.0 | 9.6 | 12.4 | 31.8 | 73.1 | 101.6 | 96.7 | 77.9 | 86.7 | 94.3 |
| | 13.0 | 10.9 | 16.2 | 44.1 | 85.5 | 102.0 | 110.9 | 123.8 | 101.9 | 102.9 |

[1776] Several PNPLA3 ssRNAi agents were also prepared and tested which have an abasic site, specifically a (phosphaneyl)oxy)propan-1-ol (PS) or 3′-(phosphaneyl)oxy)tetrahydrofuran. Results for oligonucleotide administration at 2 nM is shown, and oligonucleotides were also tested at 0, 0.05, 0.128, 0.32, and 0.8 nM (data not shown). Numbers are approximate and represent residual PNPLA3 mRNA level (PNPLA3/HPRT1), wherein 100 would represent 100% residual mRNA level (0% knockdown) and 0 would represent 0% residual rRNA level (100% knockdown). In the various tables herein, the level of mRNA is measured, unless otherwise noted.

TABLE 111
Activity of oligonucleotides.

| Oligonucleotide | 2 nM |
|---|---|
| WV-4098 | 30 |
| WV-9273 | 72 |
| WV-9274 | 73 |
| WV-9275 | 74 |
| WV-9276 | 52 |
| WV-9277 | 44 |
| WV-9278 | 55 |
| WV-9279 | 39 |
| WV-9280 | 82 |
| WV-9281 | 68 |

TABLE 112
Activity of oligonucleotides.

| Oligonucleotide | 2 nM |
|---|---|
| WV-4098 | 31 |
| WV-9261 | 62 |
| WV-9262 | 69 |
| WV-9263 | 72 |
| WV-9264 | 62 |
| WV-9265 | 56 |
| WV-9266 | 64 |
| WV-9267 | 43 |
| WV-9268 | 69 |
| WV-9269 | 71 |
| WV-4098 | 31 |
| WV-9272 | 81 |
| WV-9284 | 75 |

Several APOC3 ssRNAi agents were also prepared and tested which have C₃ modification. Results for oligonucleotide administration at 2 nM is shown, and oligonucleotides were also tested at 0, 0.05, 0.128, 0.32, and 0.8 nM (data not shown). Numbers are approximate and represent residual PNPLA3 mRNA level (PNPLA3/HPRT1), wherein 100 would represent 100% residual mRNA level (0% knockdown) and 0 would represent 0% residual mRNA level (100% knockdown). In the various tables herein, the level of mRNA is measured, unless otherwise noted.

TABLE 113
Activity of oligonucleotides.

| Oligonucleotide | 25 nM |
|---|---|
| WV-3421 | 13 |
| WV-9434 | 63 |
| WV-9439 | 55 |
| WV-9444 | 37 |
| WV-3421 | 12 |
| WV-9435 | 62 |
| WV-9440 | 37 |
| WV-9445 | 34 |
| WV-3421 | 17 |
| WV-9431 | 92 |
| WV-9436 | 70 |
| WV-9441 | 73 |
| WV-9432 | 53 |
| WV-9437 | 36 |
| WV-9442 | 54 |
| WV-9433 | 77 |
| WV-9438 | 44 |
| WV-9443 | 69 |

[1777] Data is shown for 25 nM; oligonucleotides were also tested at 0, 1.6, and 6.2 nM (data not shown). Oligonucleotides were tested in vitro in primary cynomolgus hepatocytes.

TABLE 114
Activity of oligonucleotides.

| | Hep3b (wt) | Huh7 (mutant) |
|---|---|---|
| WV-9890 | 88 | 37 |
| WV-12100 | 103 | 27 |
| WV-9893 | 67 | 10 |
| WV-12101 | 69 | 8 |

Primary cynomolgus hepatocytes. Data is shown for 4 nM. Oligonucleotides were also tested at 0, 0.1, 0.25, 0.66, 1.6, and 1.0 nM (data not shown). Numbers represent residual PNPLA3 mRNA level (PNPLA3/14 PRT1) and numbers are approximate.
WV-9893 and WV-12101 have an asymmetrical format.
Additional oligonucleotides which have an asymmetrical format, but which are stereorandom, were tested, which have the double mutation at P9/P12 (positions 9 and 12). WV-8609, WV-8847, WV-8848, WV-8849 all had an 1050 of around 4 to 5 nM.

TABLE 115A
Activity of oligonucleotides.

| | |
|---|---|
| WV-7805 | 58 |
| WV-8603 | 46 |
| WV-8608 | 73 |
| WV-9889 | 69 |
| WV-9890 | 76 |
| WV-8609 | 26 |
| WV-8601 | 61 |
| WV-8605 | 65 |
| WV-8606 | 105 |
| WV-9891 | 43 |
| WV-9892 | 52 |
| WV-9893 | 115 |

Several PNPLA3 oligonucleotides, some of which have an asymmetrical structure, were tested for stability in rat liver homogenate at 2 days. Numbers represent % of full-length oligonucleotide remaining; numbers are approximate.

TABLE 115B
Activity of oligonucleotides.

| Oligonucleotide | Ligand | mFX1/mHPRT1 |
|---|---|---|
| WV-3969 | Tri-GalNAc | 23 |
| WV-5287 | Tri-PFE ligand | 22 |
| WV-7299 | Bi-GalNAc | 22 |
| WV-7300 | Bi-PFE ligand | 20 |
| WV-7297 | Mono-GalNAc | 74 |
| WV-7298 | Mono-PFE ligand | 43 |

Several oligonucleotides were also prepared which target a mouse homolog of different gene, Factor XI (FX1 or F11), and which comprised an additional component, which was a tri-, bi- or mono-antennary ligand which was either a GalNAc or a PFE ligand. These were administered to mice at 0.3, 1 or 3 mpK QDx3. Numbers below represent the mFXI/mHPRT1 mRNA level relative to control at 3 mpk. Mice were also administered oligonucleotides at 0.3 and 1 mpk (data not shown).

TABLE 115C
Oligonucleotides.

| Oligo- | | SEQ ID | Naked | Stereo- |
|---|---|---|---|---|
| nucleotide | Sequence | NO | Sequence | chemistry |
| WV-7297 | Mod038L001Teo * Geo * Geo * | 1131 | TGGTAA | OXXXXXXXXXX |
| | Teo * Aeo * A * T * m5C * | | TCCACTT | XXXXXXXXX |
| | m5C * A * m5C * T * T * T * | | TCAGAGG | |
| | m5C * Aeo * Geo * Aeo * | | | |
| | Geo * Geo | | | |
| WV-7298 | Mod039L001Teo * Geo * Geo * | 1132 | TGGTAA | OXXXXXXXXXX |
| | Teo * Aeo * A * T * m5C * | | TCCACTT | XXXXXXXXX |
| | m5C * A * m5C * T * T * T * | | TCAGAGG | |
| | m5C * Aeo * Geo * Aeo * | | | |
| | Geo * Geo | | | |
| WV-7299 | Mod040L001Teo * Geo * Geo * | 1133 | TGGTAA | OXXXXXXXXXX |
| | Teo * Aeo * A * T * m5C * | | TCCACTT | XXXXXXXXX |
| | m5C * A * m5C * T * T * T * | | TCAGAGG | |
| | m5C * Aeo * Geo * Aeo * | | | |
| | Geo * Geo | | | |
| WV-7300 | Mod041L001Teo * Geo * Geo * | 1134 | TGGTAA | OXXXXXXXXXX |
| | Teo * Aeo * A * T * m5C * | | TCCACTT | XXXXXXXXX |
| | m5C * A * m5C * T * T * T * | | TCAGAGG | |
| | m5C * Aeo * Geo * Aeo * | | | |
| | Geo * Geo | | | |
| WV-5287 | Mod034L001Teo * Geo * Geo * | 1135 | TGGTAA | OXXXXXXXXXX |
| | Teo * Aeo * A * T * m5C * | | TCCACTT | XXXXXXXXX |
| | m5C * A * m5C * T * T * T * | | TCAGAGG | |
| | m5C * Aeo * Geo * Aeo * | | | |
| | Geo * Geo | | | |

[1778] The various components (e.g., *, Mod038, etc.) in this table are the same as those in Table 1A. All of these oligonucleotides are single-stranded, though the sequences are split into multiple lines for formatting.

Various oligonucleotides were constructed which comprise a tri-, bis- or mono-antennary ligand which is either the PFE ligand or GalNAc.

[1779] In some experiments, compounds were constructed which comprise an oligonucleotide conjugated to a mono-, bis- or tri-antennary GalNAc (also designated Ref. GalNAc or Reference GalNAc) or PFE ligand (also described as PFE ASPGR ligand, PFE GalNAc, bridged bicyclic ketal or bicyclic ligand).

[1780] In some embodiments, oligonucleotides are PNPLA3 oligonucleotides, in some embodiments, oligonucleotides target a different gene, APOC3.

Such APOC3 oligonucleotides include:

TABLE 115D
Oligonucleotides.

| | | Alternative | Example | Example |
|---|---|---|---|---|
| | | designation | describing | describing |
| | | of ligand | example | example |
| | | and linker | synthesis | synthesis of |
| Oligo- | | (L001 is a | of | oligonucleotide |
| nucleotide | Ligand | linker) | ligand | with ligand |
| WV-8877 | None | — | — | — |
| WV-7107 | None | — | — | 37A |
| WV-6558 | Ref. GalNAc | Mod001L001 | 38 (protected | 37A, 37B |
| | Tri-antennary | | version) | |
| WV-9542 | PFE ligand | Mod083L001 | 31, 40 | 37C |
| | Tri-antennary | | | |
| WV-9543 | Ref GalNAc | Mod079L001 | 35 (protected | 37D |
| | Bis-antennary | | version) | |
| WV-9544 | PFE ligand | Mod080L001 | 32, 33 | 37E |
| | Bis-antennary | | | |
| WV-9545 | Ref GalNAc | Mod081L001 | 36 | 37F |
| | Mono- | | (protected | |
| | antennary | | version) | |
| WV-9546 | PFE ligand | Mod082L001 | 34 | 37G |
| | Mono- | | | |
| | antennary | | | |

[1781] Ref GalNAc Tri-antennary is also designated Tri-GalNAc; PFE ligand Tri-antennary is also designated Tri-PFE ligand; Ref. GalNAc Bis-antennary is also designated Bis-GalNAc; PFE ligand Bis-antennary is also designated Bis-PFE ligand; Ref. GalNAc Mono-antennary is also designated Mono-GalNAc; and PFE ligand Mono-antennary is also designated Mono-PFE ligand. The structures of Mod001, Mod079, Mod080, Mod081, Mod082, Mod083 and L001 are provided in the legend to Table 1A and in other texts herein. Ligands are also described in Example 27. Mod083 is also described in Example 4A and 4B.

[1782] The GalNAc structures in Examples 29, 35, and 36 represent the protected versions, as they comprise -OAc (-O-acetate groups). In construction of the listed oligonucleotides, the Ac groups are removed during de-protection following conjugation of the compound to the oligonucleotide. De-protection is performed, for example, with concentrated ammonium hydroxide, e.g., as described in Example 37B. In the de-protected versions of these structures, -OAc is replaced by —OH.

WV-8877 (negative control) targets a different gene, which is not APOC3 or PNPLA3.

[1783] The APOC3 oligonucleotide WV-7107, conjugated with GalNAc or PFE ligand at different valencies (mono, his or triantennary) and the negative control were separately administered to Tg (transgenic) mice harboring the human APOC3 transgene (B6.Cg-Tg (APOC3)₂Bres/J) on day 1, and APOC3 knockdown was monitored by serum hAPOC3 protein reduction.

| WAVE | | SEQ ID | Naked | Stereo- |
|---|---|---|---|---|
| ID | Sequence | NO | Sequence | chemistry |
| WV- | Mod001L001Aeo * SGeom5CeoTeoTeo * RC * ST * ST * | 1136 | AGCTTCTTGTC | OSOOORSSSRS |
| 6558 | SG * RT * SC * SC * RA * SG* SC * RTeoTeoTeoAeo * | | CAGCTTTAT | SRSSROOOS |
| | STeo | | | |
| WV- | Mod083L001Aeo * SGeom5CeoTeoTeo * RC * ST * ST * | 1137 | AGCTTCTTGTC | OSOOORSSSRS |
| 9542 | SG * RT * SC * SC * RA * SG* SC * RTeoTeoTeoAeo * | | CAGCTTTAT | SRSSROOOS |
| | STeo | | | |
| WV- | Mod079L001Aeo * SGeom5CeoTeoTeo * RC * ST * ST * | 1138 | AGCTTCTTGTC | OSOOORSSSRS |
| 9543 | SG * RT * SC * SC * RA * SG* SC * RTeoTeoTeoAeo * | | CAGCTTTAT | SRSSROOOS |
| | STeo | | | |
| WV- | Mod080L001Aeo * SGeom5CeoTeoTeo * RC * ST * ST * | 1139 | AGCTTCTTGTC | OSOOORSSSRS |
| 9544 | SG * RT * SC * SC * RA * SG* SC * RTeoTeoTeoAeo * | | CAGCTTTAT | SRSSROOOS |
| | STeo | | | |
| WV- | Mod081L001Aeo * SGeom5CeoTeoTeo * RC * ST * ST * | 1140 | AGCTTCTTGTC | OSOOORSSSRS |
| 9545 | SG * RT * SC * SC * RA * SG* SC * RTeoTeoTeoAeo * | | CAGCTTTAT | SRSSROOOS |
| | STeo | | | |
| WV- | Mod082L001Aeo * SGeom5CeoTeoTeo * RC * ST * ST * | 1141 | AGCTTCTTGTC | OSOOORSSSRS |
| 9546 | SG * RT * SC * SC * RA * SG* SC * RTeoTeoTeoAeo * | | CAGCTTTAT | SRSSROOOS |
| | STeo | | | |

[1784] The various components (e.g., *, Mod083, etc.) in this table are the same as those in Table 1 A. All of these oligonucleotides are single-stranded, though the sequences are split into multiple Jim for formatting.

[1785] PNPLA3 oligonucleotides comprising various ligands (including but not limited to Ref. GalNAc Tri-antennary, PFE ligand Tri-antennary, Ref. GalNAc Bis-antennary, PFE ligand Bis-antennary, Ref. GalNAc Mono-antennary, PFE ligand Mono-antennary) were constructed via methods akin to those described for corresponding APOC3 oligonucleotides.

[1786] All oligonucleotides were administered to animals at a 3 mg/kg single dose (s.c.) at day 1. In addition, WV-6558 and WV-9542 were also administered to animals at a 1 mg/kg single dose (s.c.) at day 1. Serum was collected at days 0, 8, 15, 22, 29, 36, 43, and 50. Each group contained 5 animals. PBS and WV-8877 (which targets a gene which is not APOC3) were negative controls.

Numbers indicate relative APOC3 protein level, wherein 1.00 represents 100% relative to PBS.
In various in vivo studies, including this one, tested animals were transgenic mice expressing the human APOC3 gene.

TABLE 115E
Activity of oligonucleotides

| Day | 0 | 8 | 15 | 22 | 29 | 36 | 43 | 50 |
|---|---|---|---|---|---|---|---|---|
| PBS | 1.52 | 0.95 | 1.50 | 0.56 | 0.96 | 1.07 | 1.57 | 1.74 |
| | 0.59 | 0.73 | 0.74 | 0.87 | 0.90 | 0.90 | 0.73 | 0.71 |
| | 1.21 | 0.99 | 1.10 | 1.34 | 0.89 | 0.82 | 0.62 | 0.78 |
| | 0.67 | 1.14 | 0.89 | 0.99 | 0.89 | 0.86 | 0.95 | 0.86 |
| | 1.01 | 1.20 | 0.76 | 1.24 | 1.35 | 1.36 | 1.13 | 0.91 |
| WV-8877 | 1.56 | 1.24 | 1.67 | 1.59 | 2.37 | 1.56 | 1.47 | 2.27 |
| | 0.78 | 0.73 | 0.85 | 0.80 | 1.15 | 0.61 | 0.75 | 1.19 |
| | 1.08 | 0.81 | 1.42 | | 1.84 | 1.21 | 1.73 | 3.05 |
| | 0.71 | 1.21 | 0.74 | 0.62 | 1.02 | 1.07 | 0.95 | 1.48 |
| | 1.28 | 1.21 | 0.60 | 0.80 | 1.13 | 1.50 | 0.86 | |
| WV-6558 | 2.74 | 0.06 | 0.05 | 0.06 | 0.11 | 0.38 | 0.69 | 1.43 |
| | 1.15 | 0.17 | 0.05 | 0.04 | 0.09 | 0.27 | 0.01 | 0.81 |
| | 0.38 | 0.04 | 0.05 | 0.10 | 0.18 | 0.45 | 0.53 | 1.07 |
| | 0.44 | | | | | | | |
| | 0.41 | 0.04 | 0.04 | 0.08 | 0.09 | 0.11 | 0.13 | 0.22 |
| WV-9542 | 1.10 | 0.23 | 0.05 | 0.07 | 0.13 | 0.23 | 0.32 | 0.78 |
| | 0.71 | 0.03 | 0.02 | 0.04 | 0.06 | 0.09 | 0.20 | 0.28 |
| | 0.59 | 0.05 | 0.04 | 0.08 | 0.16 | 0.72 | 0.90 | 0.80 |
| | 0.32 | 0.03 | 0.02 | 0.04 | 0.09 | 0.37 | 0.54 | 0.55 |
| | 0.40 | 0.03 | 0.03 | 0.06 | 0.21 | 0.39 | 0.49 | 0.58 |
| WV-9543 | 0.48 | 0.03 | 0.05 | 0.09 | 0.08 | 0.21 | 0.27 | 0.49 |
| | 1.19 | 0.06 | 0.06 | 0.09 | 0.06 | 0.09 | 0.57 | 0.96 |
| | 0.79 | 0.05 | 0.04 | 0.17 | 0.06 | 0.15 | 0.42 | 0.80 |
| | 0.79 | 0.09 | 0.03 | 0.28 | 0.20 | 0.17 | 0.28 | 0.59 |
| | 0.48 | 0.04 | 0.02 | 0.08 | 0.06 | 0.12 | 0.17 | 0.32 |
| WV-9544 | 0.91 | | 0.04 | 0.06 | 0.06 | 0.19 | 0.26 | 0.67 |
| | 0.94 | 0.10 | 0.03 | 0.08 | 0.09 | 0.15 | 0.34 | 0.76 |
| | 1.72 | 0.19 | 0.04 | 0.07 | 0.09 | 0.25 | 0.60 | 0.83 |
| | 1.92 | 0.28 | 0.07 | 0.10 | 0.11 | 0.13 | 0.26 | 0.56 |
| | 0.81 | 0.04 | 0.05 | 0.11 | 0.12 | 0.20 | 0.32 | 0.73 |
| WV-9545 | 0.49 | 0.03 | 0.07 | 0.16 | 0.21 | 0.32 | 0.66 | 0.60 |
| | 1.14 | 0.22 | 0.04 | 0.10 | 0.15 | 0.58 | 0.76 | 0.97 |
| | 0.58 | 0.03 | 0.04 | 0.15 | 0.27 | 0.67 | 1.16 | 0.97 |
| | 0.64 | 0.03 | 0.04 | 0.19 | 0.42 | 0.98 | 1.38 | 0.96 |
| | 0.60 | 0.05 | 0.03 | 0.08 | | | | |
| WV-9546 | 3.33 | 0.20 | 0.06 | 0.27 | 0.24 | 0.49 | 1.13 | 1.31 |
| | 1.03 | 0.11 | 0.04 | 0.09 | 0.14 | 0.46 | 0.55 | 0.68 |
| | 1.20 | 0.28 | 0.12 | 0.20 | 0.31 | 0.95 | 1.75 | 1.39 |
| | 0.71 | 0.15 | 0.04 | 0.19 | 0.39 | 0.26 | 0.75 | 0.36 |
| | 0.18 | 0.04 | 0.02 | 0.20 | 0.28 | 0.21 | 0.56 | 0.56 |

TABLE 115F
Part I. Oligonucleotide accumulation in the liver

| | WV- | WV- | WV- | WV- | WV- | WV- |
|---|---|---|---|---|---|---|
| PBS | 6558 | 9542 | 9543 | 9544 | 9545 | 9546 |
| 0 | 2.95 | 1.73 | 3.52 | 3.82 | 2.02 | 4.27 |
| 0 | 2.46 | 1.69 | 2.49 | 4.19 | 1.99 | 1.37 |
| 0 | 2.48 | 0.45 | 1.14 | 2.74 | 1.30 | 1.29 |
| 0 | 1.85 | 1.09 | 2.12 | 2.26 | 1.14 | 1.25 |
| 0 | 1.79 | 1.43 | 4.26 | 1.88 | 1.07 | 0.82 |

[1787] Oligonucleotide accumulation in the liver was also analyzed after a single 3 mg/kg dose, 30 min. Numbers indicate μg of oligonucleotide/g of tissue. Tested animals were transgenic mice expressing the human APOC3 gene.

[1788] In the same experiment: Oligonucleotide accumulation in the liver was also analyzed for WV-6558 and WV-9542 after a single 1 mg/kg dose, 30 min. Numbers indicate μg of oligonucleotide/g of tissue.

| | WV-6558 | WV-9542 |
|---|---|---|
| PBS | 1 mpk | 1 mpk |
| 0 | 1.92 | 0.46 |
| 0 | 1.77 | 1.08 |
| 0 | 1.43 | 0.56 |
| 0 | 0.68 | 0.30 |
| 0 | 0.18 | 0.67 |

TABLE 115F
Part II. Oligonucleotide accumulation in the liver

| | WV- | WV- | WV- | WV- | WV- | WV- |
|---|---|---|---|---|---|---|
| PBS | 6558 | 9542 | 9543 | 9544 | 9545 | 9546 |
| 0 | 3.30 | 2.93 | 6.83 | 4.56 | 3.55 | 3.83 |
| 0 | 3.49 | 2.20 | 6.56 | 4.45 | 2.23 | 4.05 |
| 0 | 3.18 | 1.34 | 4.58 | 2.72 | 1.94 | 2.28 |
| 0 | 2.41 | 1.61 | 3.87 | 2.31 | 3.03 | 2.12 |
| 0 | 1.43 | 2.90 | 4.10 | 2.36 | 1.85 | 3.50 |

[1789] Oligonucleotide accumulation in the liver was also analyzed after a single 3 mg/kg dose, 8 days. Numbers indicate μg of oligonucleotide/g of tissue. Tested animals were transgenic mice expressing the human APOC3 gene.

[1790] In the same experiment: Oligonucleotide accumulation in the liver was also analyzed for WV-6558 and WV-9542 after a single 1 mg/kg (1 mpk) dose, 8 days. Numbers indicate μg of oligonucleotide/g of tissue.

| | WV-6558 | WV-9542 |
|---|---|---|
| PBS | 1 mpk | 1 mpk |
| 0 | 0.72 | 1.08 |
| 0 | 0.74 | 1.20 |
| 0 | 0.60 | 0.75 |
| 0 | 0.55 | 0.57 |
| 0 | 0.63 | 0.63 |

[1791] The data show the efficacy of various ligands conjugated to APOC3 oligonucleotides; these same ligands can also be conjugated onto PNPLA3 oligonucleotides.

### Table 116. Activity of Oligonucleotides.

[1792] Various PNPLA3 RNAi agents were tested for stability in rat liver homogenate. Numbers represent percent of full-length oligonucleotide remaining at 5 days; oligonucleotides were also tested at 2 days (data not shown); and numbers are approximate. Some oligonucleotides comprise a 5′-DNA T and some oligonucleotides comprise a 5′-Rc-Me-T.

TABLE 117
Activity of oligonucleotides.

| | |
|---|---|
| WV-8095 | 62 |
| WV-9495 | 61 |
| WV-9499 | 86 |
| WV-8701 | 49 |
| WV-9496 | 71 |
| WV-9500 | 99 |

[1793] Various PNPLA3 oligonucleotides were also tested for efficacy with an additional component which is a tri-antennary GalNAc conjugate (including, but not limited to WV-7805, WV-8132, WV-8566, WV-8599, WV-9859, and WV-9670). Oligonucleotides were tested in vitro on Huh7-148 OE cells (which comprise the mutant allele of PNPLA3) at 10 nM. Numbers represent PNPLA3 mRNA levels (PNPLA3/HPRT1), and numbers are approximate. In many cases, the oligonucleotides did not demonstrate significant knockdown of wild-type PNPLA3 in cynomolgus (non-human primate or NHP) hepatocytes. For example, WV-8132, WV-8600, WV-9868 and WV-9860 did not demonstrate significant knockdown of wild-type PNPLA3 in cynomolgus (non-human primate or NHP) hepatocytes when tested at up to 0.10 nM (data not shown).

TABLE 118
Activity of oligonucleotides.

| Negative control | 100 | Negative control | 100 |
|---|---|---|---|
| WV-993 | 117 | WV-993 | 117 |
| WV-7805 | 20 | WV-8600 | 47 |
| WV-8132 | 54 | WV-8564 | 47 |
| WV-8566 | 67 | WV-8596 | 62 |
| WV-8599 | 82 | WV-8597 | 38 |
| WV-9859 | 56 | | |
| WV-9670 | 57 | | |
| WV-993 | 117 | WV-993 | 117 |
| WV-9868 | 48 | WV-9860 | 65 |
| WV-9869 | 50 | WV-9861 | 58 |
| WV-9870 | 53 | WV-9862 | 62 |

[1794] Various PNPLA3 oligonucleotides were tested in vitro in cells after treatment with oligonucleotide. In this table, 100.00 would represent 100% PNPLA3 mRNA level and 0.00 would represent 0% PNPLA3 mRNA after treatment with oligonucleotides.

TABLE 119
Activity of oligonucleotides.

| Time (mins) | 0 | 5 | 10 | 15 | 20 | 30 | 45 | 60 |
|---|---|---|---|---|---|---|---|---|
| WV-7805 + WV-8807 | 100.0 | 94.1 | 93.4 | 88.6 | 90.6 | 82.8 | 74.5 | 73.4 |
| WV-8603 + WV-8807 | 100.0 | 93.1 | 89.7 | 84.4 | 91.0 | 82.4 | 73.0 | 66.4 |
| WV-8608 + WV-8807 | 100.0 | 95.4 | 92.2 | 89.8 | 87.4 | 81.4 | 79.7 | 72.1 |
| WV-9889 + WV-8807 | 100.0 | 90.9 | 87.7 | 81.9 | 85.7 | 74.4 | 72.9 | 66.4 |
| WV-9890 + WV-8807 | 100.0 | 92.7 | 89.6 | 85.4 | 88.7 | 77.0 | 75.8 | 66.8 |
| WV-7805 + WV-8808 | 100.0 | 99.5 | 97.7 | 98.1 | 96.9 | 96.2 | 95.6 | 93.4 |
| WV-8603 + WV-8808 | 100.0 | 102.2 | 99.4 | 100.3 | 99.1 | 98.5 | 99.2 | 95.6 |
| WV-8608 + WV-8808 | 100.0 | 98.8 | 97.5 | 96.9 | 95.9 | 96.9 | 95.5 | 94.1 |
| WV-9889 + WV-8808 | 100.0 | 99.9 | 99.2 | 99.5 | 98.6 | 97.8 | 97.2 | 96.3 |
| WV-9890 + WV-8808 | 100.0 | 107.5 | 100.7 | 100.8 | 99.1 | 104.2 | 98.3 | 97.5 |
| WV-8601 + WV-8807 | 100.0 | 93.1 | 90.9 | 90.4 | 91.4 | 88.2 | 85.6 | 80.1 |
| WV-8605 + WV-8807 | 100.0 | 98.3 | 96.0 | 96.4 | 96.0 | 96.0 | 87.1 | 86.7 |
| WV-8606 + WV-8807 | 100.0 | 90.1 | 91.6 | 90.7 | 90.9 | 86.6 | 82.4 | 79.1 |
| WV-8609 + WV-8807 | 100.0 | 92.1 | 89.0 | 83.8 | 85.5 | 75.6 | 75.7 | 69.0 |
| WV-8601 + WV-8808 | 100.0 | 99.0 | 100.2 | 100.2 | 97.8 | 97.6 | 97.2 | 94.1 |
| WV-8605 + WV-8808 | 100.0 | 100.7 | 99.7 | 100.9 | 98.4 | 99.1 | 98.5 | 94.6 |
| WV-8606 + WV-8808 | 100.0 | 101.2 | 97.6 | 98.1 | 96.3 | 97.0 | 96.5 | 93.9 |
| WV-8609 + WV-8808 | 100.0 | 96.7 | 93.7 | 98.6 | 96.8 | 95.6 | 96.2 | 94.5 |
| WV-9891 + WV-8807 | 100.0 | 91.6 | 88.3 | 86.1 | 87.9 | 79.8 | 75.6 | 75.2 |
| WV-9892 + WV-8807 | 100.0 | 93.2 | 86.9 | 83.5 | 84.3 | 74.2 | 64.2 | 58.6 |
| WV-9893 + WV-8807 | 100.0 | 94.6 | 88.6 | 86.6 | 88.6 | 77.4 | 69.0 | 65.6 |
| WV-9891 + WV-8808 | 100.0 | 98.3 | 98.6 | 96.9 | 95.0 | 94.2 | 92.8 | 89.8 |
| WV-9892 + WV-8808 | 100.0 | 100.7 | 101.8 | 100.7 | 99.3 | 97.9 | 97.4 | 95.7 |
| WV-9893 + WV-8808 | 100.0 | 100.1 | 100.3 | 100.2 | 99.3 | 96.3 | 96.1 | 93.5 |
| WV-9894 + WV-8807 | 100.0 | 96.2 | 90.1 | 85.1 | 84.7 | 79.5 | 76.8 | 74.9 |
| WV-9895 + WV-8807 | 100.0 | 97.0 | 92.5 | 87.1 | 84.3 | 77.0 | 71.8 | 70.7 |
| WV-9896 + WV-8807 | 100.0 | 98.2 | 93.2 | 86.0 | 81.8 | 74.8 | 69.2 | 70.0 |
| WV-9894 + WV-8808 | 100.0 | 98.8 | 97.1 | 97.4 | 96.1 | 94.0 | 95.4 | 91.4 |
| WV-9895 + WV-8808 | 100.0 | 99.9 | 97.1 | 98.5 | 99.3 | 96.1 | 96.4 | 93.6 |
| WV-9896 + WV-8808 | 100.0 | 99.2 | 99.0 | 98.3 | 96.4 | 95.6 | 93.8 | 90.6 |

[1795] Various PNPLA3 oligonucleotides were tested in vitro in an RNaseH assay. PNPLA3 oligonucleotides were incubated in the presence of target RNA which was the wt allele (WV-8808) or the 148 allele (WV-8807). Numbers represent the percentage of target RNA (WV-8808 or WV-8807) remaining. In this table, 100.00 would represent 100% PNPLA3 mRNA level and 0.00 would represent 0% PNPLA3 mRNA after treatment with oligonucleotides.

[1796] The PNPLA3 oligonucleotides WV-980, WV-9893, WV-8606 and WV-7805 also significantly reduced PNPLA3 148 mutant mRNA levels in Huh7 cells with PNLA3 148 mutation (to between about 25 to 55% residual mutant PNPLA3, relative to HPRT1, at 12.5 nM), but these oligonucleotides did not significantly reduce wt PNPLA3 levels in Huh7 cells with wt PNPLA3 (about 90% or more residual wt PNPLA3 level at 12.5 nM).

TABLE 120
Activity of oligonucleotides.

| Conc. | | | | | | | | |
|---|---|---|---|---|---|---|---|---|
| (nM) | | | | | | | | |
| (exp10) | 1.398 | 0.796 | 0.194 | −0.408 | −1.010 | −1.612 | −2.214 | −2.816 |
| WV-3380 | 0.059 | 0.193 | 0.568 | 0.809 | 0.809 | 0.917 | 1.032 | 0.983 |
| | 0.092 | 0.365 | 0.720 | 0.862 | | 1.004 | 1.121 | |
| WV-3986 | 0.379 | 0.444 | 0.673 | 0.790 | 0.870 | 0.870 | 0.993 | 0.933 |
| | 0.486 | 0.551 | 0.752 | 0.901 | 1.007 | 0.939 | 0.876 | 1.140 |
| WV-3987 | 0.400 | 0.521 | 0.742 | 0.870 | 0.959 | 0.889 | 0.986 | 0.952 |
| | 0.451 | 0.594 | 0.914 | 0.966 | 1.086 | 0.972 | 1.021 | 1.072 |
| WV-3988 | 0.496 | 0.521 | 0.742 | 1.021 | 0.946 | 1.079 | 0.907 | 0.959 |
| | 0.328 | 0.615 | 0.920 | 1.057 | 1.064 | 0.979 | 0.901 | 1.133 |
| WV-3393 | 0.115 | 0.165 | 0.438 | 0.795 | 0.882 | 1.028 | 1.086 | 0.986 |
| | 0.080 | 0.218 | 0.555 | 0.835 | 0.952 | 1.064 | 0.933 | 1.057 |
| WV-3989 | 0.316 | 0.279 | 0.547 | 0.790 | 0.852 | 0.993 | 0.966 | 1.000 |
| | 0.295 | 0.412 | 0.651 | 0.889 | 1.049 | 1.140 | 0.986 | 1.173 |
| WV-3990 | 0.259 | 0.444 | 0.624 | 0.979 | 1.109 | 1.021 | 1.007 | 0.993 |
| | 0.274 | 0.559 | 0.779 | 0.959 | 1.079 | 1.042 | 1.049 | 1.164 |

[1797] Various PNPLA3 oligonucleotides were tested in vitro in Hep3B cells at 48 hours after treatment with oligonucleotide, in this table, 1.00 would represent 0.100% PNPLA3 mRNA level and 0.00 would represent 0% PNPLA3 mRNA after treatment with oligonucleotides.

TABLE 121
Activity of oligonucleotides.

| Conc. | | | | | | | | |
|---|---|---|---|---|---|---|---|---|
| (nM) | | | | | | | | |
| (exp10) | 1.398 | 0.796 | 0.194 | −0.408 | −1.010 | −1.612 | −2.214 | −2.816 |
| WV-3402 | 0.146 | 0.207 | 0.457 | 0.907 | 0.933 | 0.959 | 0.939 | 0.952 |
| | 0.104 | 0.319 | 0.697 | 0.914 | 0.926 | 1.028 | 1.094 | 1.102 |
| WV-3991 | 0.216 | 0.423 | 0.582 | 0.858 | 0.907 | 0.966 | 0.870 | 0.966 |
| | 0.303 | 0.500 | 0.722 | 1.049 | 0.895 | 0.979 | 1.042 | 1.035 |
| WV-3992 | 0.303 | 0.384 | 0.594 | 0.823 | 0.818 | 0.907 | 0.847 | 0.852 |
| | 0.321 | 0.423 | 0.673 | 0.914 | 0.933 | 0.907 | 0.959 | 1.057 |

[1798] Various PNPLA3 oligonucleotides were tested in vitro in Hep3B cells at 48 hours after treatment with oligonucleotide. In this table, 1.00 would represent 100% PNPLA3 mRNA level and 0.00 would represent 0% PNPLA3 mRNA aftertreatment with oligonucleotides.

TABLE 122
Activity of oligonucleotides.

| Conc. | | | | | | | | |
|---|---|---|---|---|---|---|---|---|
| (nM) | | | | | | | | |
| (exp 10) | 1.398 | 0.796 | 0.194 | −0.408 | −1.010 | −1.612 | −2.214 | −2.816 |
| WV-3387 | 0.091 | 0.205 | 0.527 | 0.811 | 1.070 | 0.881 | 0.977 | 0.971 |
| | 0.081 | 0.135 | 0.391 | 0.851 | 1.033 | 0.964 | 0.944 | 1.070 |
| WV-3993 | 0.998 | 0.912 | 1.026 | 1.062 | 1.308 | 1.019 | 1.019 | 0.957 |
| | 0.869 | 0.912 | 1.123 | 1.077 | 1.084 | 1.048 | 1.055 | 1.100 |
| WV-3994 | 0.944 | 0.991 | 1.195 | 1.040 | 1.107 | 1.012 | 1.123 | 0.971 |
| | 0.857 | 0.991 | 1.146 | 1.077 | 1.092 | 1.138 | 1.033 | 1.154 |

[1799] Various PNPLA3 oligonucleotides were tested in vitro in Hep3B cells at 48 hours after treatment with oligonucleotide. In this table, 1.00 would represent 100% PNPLA3 mRNA level and 0.00 would represent 0% PNPLA3 mRNA aftertreatment with oligonucleotides.

TABLE 123
Activity of oligonucleotides.

| Conc. | | | | | | | | |
|---|---|---|---|---|---|---|---|---|
| (nM) | | | | | | | | |
| (exp10) | 1.398 | 0.796 | 0.194 | −0.408 | −1.010 | −1.612 | −2.214 | −2.816 |
| WV- | 0.176 | 0.264 | 0.502 | 0.912 | 0.944 | 1.170 | 1.077 | 0.887 |
| 3391 | 0.141 | 0.230 | 0.531 | 0.788 | 1.040 | 1.146 | 1.005 | 1.005 |
| WV- | 0.925 | 1.026 | 0.977 | 1.131 | 1.162 | 0.984 | 1.123 | 0.811 |
| 3995 | 0.751 | 0.957 | | 1.123 | | 1.162 | 1.062 | 0.971 |
| WV- | 0.893 | 0.899 | 0.833 | 0.991 | 1.203 | 1.146 | 1.138 | 0.964 |
| 3996 | 0.875 | 0.899 | 0.851 | 1.187 | | 1.123 | 1.040 | 1.131 |

[1800] Various PNPLA3 oligonucleotides were tested in vitro in Hep3B cells at 48 hours after treatment with oligonucleotide. In this table, 1.00 would represent 100% PNPLA3 mRNA level and 0.00 would represent 0% PNPLA3 mRNA aftertreatment with oligonucleotides.

TABLE 124
Activity of oligonucleotides.

| | 0.312 nM | | 1.25 nM | | 5 nM | |
|---|---|---|---|---|---|---|
| Control | 76.5 | 84.9 | 111.7 | 106.6 | 113.9 | 99.1 |
| WV-3380 | 86.7 | 79.0 | 58.4 | 60.3 | 27.2 | 28.6 |
| wv-4054 | 60.3 | 49.1 | 67.6 | 53.4 | 65.5 | 45.5 |
| wv-4098 | 62.0 | 43.3 | 57.7 | 50.9 | 38.5 | 52.8 |
| WV-6585 | 58.8 | 56.9 | 71.3 | 90.8 | 89.4 | 79.0 |
| WV-6586 | 82.1 | 53.7 | 82.5 | 79.5 | 89.0 | 66.2 |
| WV-6587 | 49.9 | 45.3 | 103.1 | 56.0 | 74.7 | 77.9 |
| WV-6588 | 58.6 | 60.9 | 82.1 | 84.9 | 86.5 | 85.3 |
| WV-6589 | 61.8 | 51.3 | 92.2 | 94.4 | 77.8 | 83.5 |
| WV-6590 | 63.7 | 64.3 | 62.9 | 83.9 | 85.5 | 60.8 |
| WV-6591 | 83.3 | 71.4 | 74.7 | 75.2 | 76.3 | 94.2 |
| WV-6592 | 49.7 | 39.8 | 51.4 | 40.4 | 54.3 | 39.4 |
| WV-6593 | 68.1 | 77.7 | 58.3 | 89.3 | 64.6 | 70.7 |
| WV-6594 | 82.1 | 53.7 | 58.7 | 59.1 | 61.6 | 62.2 |
| WV-4054 | 58.7 | 35.6 | 55.3 | 49.8 | 66.0 | 60.3 |
| WV-6595 | 40.9 | 52.4 | 58.0 | 54.5 | 60.5 | 56.2 |
| WV-6596 | 48.6 | 40.2 | 57.2 | 49.4 | 46.9 | 49.2 |
| WV-6597 | 27.7 | 31.4 | 41.8 | 52.7 | 61.3 | 45.0 |
| WV-6598 | 40.1 | 35.4 | 59.1 | 53.6 | 44.5 | 42.3 |
| WV-6599 | 37.3 | 54.3 | 73.0 | 61.8 | 76.6 | 69.6 |
| WV-6600 | 64.7 | 67.5 | 88.7 | 105.6 | 95.3 | 115.7 |
| WV-6601 | 74.2 | 48.0 | 64.4 | 51.4 | 97.0 | 81.9 |
| WV-6602 | 64.7 | 51.6 | 64.0 | 63.3 | 95.8 | 64.1 |
| WV-6603 | 57.8 | 40.4 | 85.7 | 73.9 | 67.1 | 71.1 |
| WV-6604 | 50.7 | 50.5 | 57.8 | 47.0 | 72.0 | 47.1 |
| WV-6605 | 52.1 | 52.5 | 58.2 | 57.8 | 58.9 | 57.8 |
| WV-6606 | 27.1 | 56.6 | 52.4 | 51.1 | 77.7 | 53.9 |
| WV-6607 | 35.7 | 41.6 | 44.0 | 37.0 | 76.2 | 53.7 |

[1801] Various PNPLA3 oligonucleotides were tested in vitro in cells after treatment with oligonucleotide, in this table, 100.00 would represent 100% PNPLA3 mRNA level and 0.00 would represent 0% PNPLA3 mRNA after treatment with oligonucleotides.

TABLE 125
Activity of oligonucleotides.

| | 0.312 nM | | 1.25 nM | | 5 nM | |
|---|---|---|---|---|---|---|
| Control | 76.5 | 84.9 | 111.7 | 106.6 | 113.9 | 99.1 |
| WV-3380 | 86.7 | 79.0 | 58.4 | 60.3 | 27.2 | 28.6 |
| wv-4054 | 60.3 | 49.1 | 67.6 | 53.4 | 65.5 | 45.5 |
| wv-4098 | 62.0 | 43.3 | 57.7 | 50.9 | 38.5 | 52.8 |
| WV-6608 | 74.0 | 71.3 | 64.3 | 80.2 | 90.8 | 81.4 |
| WV-6609 | 88.6 | 51.9 | 71.6 | 57.7 | 66.3 | 61.2 |
| WV-6610 | 51.1 | 59.5 | 65.1 | 51.7 | 61.2 | 60.6 |
| WV-6611 | 40.9 | 47.5 | 61.7 | 57.3 | 63.2 | 75.1 |
| WV-6612 | 50.9 | 59.8 | 50.6 | 53.3 | 75.4 | 54.3 |
| WV-6613 | 39.0 | 49.1 | 49.5 | 35.6 | 53.8 | 43.5 |
| WV-6614 | 51.6 | 65.2 | 43.6 | 59.6 | 47.8 | 67.1 |
| WV-6615 | 45.7 | 70.0 | 40.0 | 41.6 | 44.1 | 53.2 |
| WV-5305 | 61.4 | 82.3 | 73.1 | 100.3 | 83.3 | 101.0 |
| WV-6616 | 63.6 | 49.3 | 67.0 | 74.3 | 62.0 | 70.1 |
| WV-6617 | 67.5 | 45.2 | 44.0 | 54.6 | 54.9 | 59.2 |
| WV-6618 | 53.4 | 44.2 | 45.4 | 46.4 | 66.5 | 32.9 |
| WV-6619 | 56.7 | 28.9 | 64.4 | 50.3 | 49.7 | 42.9 |
| WV-6620 | 61.8 | 55.6 | 57.8 | 90.1 | 37.8 | 52.5 |
| WV-6621 | 63.3 | 51.1 | 55.0 | 73.3 | 31.4 | 54.7 |
| WV-6622 | 67.5 | 34.7 | 55.2 | 48.0 | 27.4 | 61.7 |
| WV-6623 | 57.1 | 56.5 | 73.3 | 88.7 | 78.4 | 95.9 |

Various PNPLA3 oligonucleotides were tested in vitro in cells after treatment with oligonucleotide. In this table, 100.00 would represent 100% PNPLA3 mRNA level and 0.00 would represent 0% PNPLA3 mRNA after treatment with oligonucleotides.

TABLE 126
Activity of oligonucleotides.

| | 0.312 nM | | 1.25 nM | | 5 nM | |
|---|---|---|---|---|---|---|
| Control | 76.5 | 84.9 | 111.7 | 106.6 | 113.9 | 99.1 |
| WV-3380 | 86.7 | 79.0 | 58.4 | 60.3 | 27.2 | 28.6 |
| wv-4054 | 60.3 | 49.1 | 67.6 | 53.4 | 65.5 | 45.5 |
| wv-4098 | 62.0 | 43.3 | 57.7 | 50.9 | 38.5 | 52.8 |
| WV-6624 | 59.2 | 71.5 | 52.2 | 78.3 | 64.7 | 59.0 |
| WV-6625 | 53.7 | 50.7 | 49.4 | 41.9 | 53.1 | 51.1 |
| WV-6626 | 62.3 | 58.2 | 65.0 | 70.4 | 39.7 | 53.9 |
| WV-6627 | 57.5 | 51.1 | 66.9 | 59.1 | 49.2 | 52.9 |
| WV-6628 | 44.8 | 48.6 | 61.5 | 59.8 | 50.4 | 63.3 |
| WV-6629 | 61.4 | 54.4 | 59.5 | 86.7 | 52.5 | 58.3 |
| WV-6630 | 40.8 | 54.1 | 44.5 | 46.3 | 56.3 | 54.3 |
| WV-6631 | 61.0 | 61.4 | 47.6 | 111.2 | 75.1 | 70.1 |
| WV-6632 | 67.5 | 96.3 | 93.1 | 79.0 | 84.8 | 86.5 |
| WV-6633 | 61.1 | 56.4 | 51.8 | 37.1 | 40.6 | 46.0 |
| WV-6634 | 66.7 | 65.7 | 52.8 | 51.9 | 39.1 | 39.0 |
| WV-6635 | 90.3 | 63.6 | 72.6 | 68.6 | 66.7 | 70.6 |
| WV-6636 | 68.0 | 40.3 | 57.7 | 55.9 | 45.1 | 50.6 |
| WV-6637 | 68.0 | 46.2 | 46.9 | 60.4 | 40.2 | 69.4 |
| WV-6638 | 46.2 | 38.0 | 64.8 | 41.3 | 40.3 | 32.9 |

[1802] Various PNPLA3 oligonucleotides were tested in vitro in cells after treatment with oligonucleotide. In this table, 100.00 would represent 100% PNPLA3 mRNA level and 0.00 would represent 0% PNPLA3 mRNA after treatment with oligonucleotides.

TABLE 127
Activity of oligonucleotides.

| | 0.312 nM | | 1.25 nM | | 5 nM | |
|---|---|---|---|---|---|---|
| Control | 76.5 | 84.9 | 111.7 | 106.6 | 113.9 | 99.1 |
| WV-3380 | 86.7 | 79.0 | 58.4 | 60.3 | 27.2 | 28.6 |
| wv-4054 | 60.3 | 49.1 | 67.6 | 53.4 | 65.5 | 45.5 |
| wv-4098 | 62.0 | 43.3 | 57.7 | 50.9 | 38.5 | 52.8 |
| WV-6639 | 94.8 | 81.0 | 113.1 | 90.2 | 68.5 | 69.4 |
| WV-6640 | 91.3 | 78.0 | 60.4 | 87.5 | 87.7 | 61.7 |
| WV-6641 | 76.4 | 113.6 | 83.1 | 87.6 | 59.6 | 65.0 |
| WV-6642 | 95.0 | 104.3 | 90.6 | 98.5 | 74.8 | 73.5 |
| WV-6643 | 126.6 | 90.1 | 96.8 | 77.1 | 60.0 | 75.3 |
| WV-6644 | 125.8 | 94.5 | 89.9 | 85.1 | 81.4 | 63.5 |
| WV-6645 | 93.1 | 74.3 | 97.7 | 66.4 | 68.9 | 40.8 |
| WV-6646 | 83.5 | 80.4 | 85.1 | 60.9 | 56.7 | 33.7 |
| WV-6647 | 92.9 | 77.8 | 91.8 | 79.8 | 125.9 | 62.3 |
| WV-6648 | 104.4 | 88.7 | 92.0 | 111.5 | 67.3 | 73.3 |
| WV-6649 | 106.9 | 85.8 | 79.7 | 85.5 | 78.4 | 74.5 |
| WV-6650 | 94.6 | 79.2 | 87.4 | 91.5 | 66.5 | 97.9 |
| WV-6651 | 116.4 | 74.8 | 92.2 | 96.8 | 58.0 | 57.3 |
| WV-6652 | 114.1 | 70.2 | 110.9 | 94.0 | 88.6 | 66.4 |
| WV-6653 | 116.1 | 89.1 | 90.0 | 100.0 | 77.3 | 72.9 |
| WV-6654 | 84.9 | 99.0 | 101.1 | 128.1 | 67.4 | 70.9 |
| WV-6655 | 102.0 | 99.5 | 116.9 | 83.8 | 114.7 | 85.6 |
| WV-6656 | 115.3 | 119.9 | 114.7 | 85.2 | 101.0 | 108.4 |
| WV-6657 | 88.6 | 94.1 | 114.1 | 109.7 | 94.6 | 100.4 |
| WV-6658 | 114.4 | 92.2 | 131.2 | 134.7 | 133.3 | 90.6 |
| WV-6659 | 116.9 | 104.2 | 122.1 | 96.6 | 99.8 | 122.3 |
| WV-6660 | 104.7 | 79.5 | 124.1 | 100.2 | 79.7 | 88.5 |

[1803] Various PNPLA3 oligonucleotides were tested in vitro in cells after treatment with oligonucleotide. In this table, 100.00 would represent 100% PNPLA3 mRNA level and 0.00 would represent 0% PNPLA3 mRNA after treatment with oligonucleotides.

TABLE 129
Activity of oligonucleotides.

| | | | | | 12.5 |
|---|---|---|---|---|---|
| | 0 | 0.1 nM | 0.4 nM | 3.0 nM | nM |
| WV- | 96.1 | 76.8 | 61.7 | 58.2 | 53.6 |
| 4098 | 105.7 | 73.2 | 58.3 | 47.9 | 57.9 |
| WV- | 107.4 | 92.5 | 117.0 | 85.0 | 74.7 |
| 7776 | 85.4 | 93.1 | 102.7 | 73.4 | 62.5 |
| WV- | 107.4 | 107.4 | 88.2 | 63.2 | 71.7 |
| 7777 | 90.9 | 90.9 | 73.4 | 73.1 | 59.8 |

[1804] Various PNPLA3 oligonucleotides were tested in vitro in cells after treatment with oligonucleotide, in this table, 100.00 would represent 100% PNPLA3 mRNA level and 0.00 would represent 0% PNPLA3 mRNA after treatment with oligonucleotides.

TABLE 130
Activity of oligonucleotides.

| | WV-4098 | WV-7465 | WV-8076 |
|---|---|---|---|
| 0 | 103.4 | 112.5 | 101.0 |
| | 86.2 | 95.5 | 109.7 |
| 0.02 nM | 82.5 | 62.8 | 67.2 |
| | 91.2 | 61.6 | 79.1 |
| 0.1 nM | 54.4 | 39.5 | 46.5 |
| | 56.3 | 48.4 | 72.2 |
| 0.4 nM | 49.6 | 31.2 | 46.6 |
| | 48.1 | 42.7 | 43.9 |
| 3.125 nM | 21.9 | 39.2 | 82.0 |
| | 33.7 | 37.1 | 79.7 |

[1805] Various PNPLA3 oligonucleotides were tested in vitro in Huh7 cells. Residual levels of PNPLA3 mRNA are shown, wherein PNPLA3 is relative to HPRT1. In this table, 100.00 would represent 100% PNPLA3 mRNA level and 0.00 would represent 0% PNPLA3 mRNA after treatment with oligonucleotides.

TABLE 131
Activity of oligonucleotides.

| | WV-4098 | WV-8080 | WV-8081 |
|---|---|---|---|
| 0 | 103.4 | 83.3 | 79.2 |
| | 86.2 | 109.8 | 89.9 |
| 0.02 nM | 82.5 | 58.1 | 97.2 |
| | 91.2 | 89.1 | 92.4 |
| 0.1 nM | 54.4 | 71.2 | 91.7 |
| | 56.3 | 72.1 | 95.5 |
| 0.4 nM | 49.6 | 79.8 | 94.4 |
| | 48.1 | 97.9 | 108.2 |
| 3.125 nM | 21.9 | 59.3 | 115.6 |
| | 33.7 | 62.0 | 122.4 |

[1806] Various PNPLA3 oligonucleotides were tested in vitro in Huh7 cells. Residual levels of PNPLA3 mRNA are shown, wherein PNPLA3 is relative to HPRT1. In this table, 100.00 would represent 100% PNPLA3 mRNA level and 0.00 would represent 0% PNPLA3 mRNA after treatment with oligonucleotides.

TABLE 132
Activity of oligonucleotides.

| | WV-4098 | WV-8077 | WV-8078 | WV-8079 |
|---|---|---|---|---|
| 0 | 103.4 | 108.4 | 94.0 | 80.9 |
| | 86.2 | 107.6 | 98.3 | 87.7 |
| 0.02 nM | 82.5 | 102.1 | 96.4 | 71.1 |
| | 91.2 | | 99.8 | 69.3 |
| 0.1 nM | 54.4 | 87.6 | 93.9 | 75.6 |
| | 56.3 | 87.9 | 118.3 | 97.5 |
| 0.4 nM | 49.6 | 83.4 | 91.0 | 88.6 |
| | 48.1 | 97.1 | 116.6 | 120.6 |
| 3.125 nM | 21.9 | 79.8 | 73.7 | 105.4 |
| | 33.7 | 74.8 | 87.7 | |

[1807] Various PNPLA3 oligonucleotides were tested in vitro in Huh7 cells. Residual levels of PNPLA3 mRNA are shown, wherein PNPLA3 is relative to HPRT1. In this table, 100.00 would represent 100% PNPLA3 mRNA level and 0.00 would represent 0% PNPLA3 mRNA after treatment with oligonucleotides.

TABLE 133
Activity of oligonucleotides.

| | WV-4098 | WV-7465 |
|---|---|---|
| 0 | 103.4 | 112.5 |
| | 86.2 | 95.5 |
| 0.02 | 82.5 | 62.8 |
| nM | 91.2 | 61.6 |
| 0.1 | 54.4 | 39.5 |
| nM | 56.3 | 48.4 |
| 0.4 | 49.6 | 31.2 |
| nM | 48.1 | 42.7 |
| 3.125 | 21.9 | 39.2 |
| nM | 33.7 | 37.1 |

Various PNPLA3 oligonucleotides were tested in Huh7 cells. Residual levels of PNPLA3 mRNA are shown, wherein PNPLA3 is relative to HPRT1. In this table, 100.00 would represent 100% PNPLA3 mRNA level and 0.00 would represent 0% PNPLA3 mRNA after treatment with oligonucleotides.

[1808] Several PNPLA3 oligonucleotides were also tested in vitro for cytokine release, including WV-8061, WV-8291, WV-8698, and WV-8700. None of the 4 PNPLA3 ssRNAi agents induced cytokine release (IL-1β, IL-6, MCP-1, IL-12p40, IL-12p70, IL-1α, MIP-1 α, MIP-1 β, TNFα) in any of the donor samples. In contrast, positive control induced cytokine activation even at low concentrations (0.78 ug/ml).

### Example 27. Example Additional Components of Oligonucleotides

[1809] Various oligonucleotides were designed and constructed which comprise various additional components. Various additional PNPLA3 oligonucleotides described herein can also be conjugated to these additional components.

[1810] These additional components include those listed herein:

[1811] Tri-antennary ligand is also known as Tri-PFE ASPGR ligand or Tri-PFE ligand or Tri-PFE:

[chemical structure]

[1812] Bis-antennary (or bi-antennary) ligand, also known as bis- (or bi-) antennary PFE ligand or bis- (or bi-) antennary PFE ASPGR ligand or bis-PFE:

[chemical structure]

[1813] Mono-antennary ligand, also known as mono-antennary PFE ligand or mono-antennary PFE ASPGR ligand or mono-PFE:

[chemical structure]

[1814] Tri-antennary GalNAc or Tri-GalNAc:

[chemical structure]

Protected versions of:

[1815] Bis-antennary (bi-antennary) GalNAc or bis-GalNAc:

[chemical structure]

[1816] Mono-antennary GalNAc or Mono-GalNAc:

[chemical structure]

[1817] These structures represent the protected versions, as they comprise -OAc (-O-acetate groups). In some embodiments, the Ac groups are removed during de-protection following conjugation of the compound to the oligonucleotide. In some embodiments, de-protection is performed with concentrated ammonium hydroxide, e.g., as described in Example 37B. In the de-protected versions of these structures, —OAc is replaced by —OH.

[1818] Some non-limiting examples of processes for production of various additional components are described below:

[chemical structure]

[chemical structure]

[chemical structure]

[chemical structure]

[chemical structure]

[chemical structure]

[chemical structure]

[chemical structure]

[chemical structure]

[chemical structure]

Various additional components described herein can be conjugated to various oligonucleotides described herein.

### Example 28. Example Analytical Methods

[1819] 1.5 minute run LRMS (low resolution mass spectroscopy): Waters Acquity HSS T3, 2.1 mm×50 mm, C18, 1.7 μm Mobile Phase: A: 0.1% formic acid in water (v/v); Mobile phase B: 0.1% formic acid in aceronitrile (v/v); Flow-1.25 ml/minute; Initial conditions: A-95%:B-5%; hold at initial from 0.0-0.1 minute; Linear Ramp to A-5%:B-95% over 0.1-1.0 minute; hold at A-5%:B-95% from 1.0-1.1 minute; return to initial conditions 1.1-1.5 minute.

: 3.0 minute run LRMS (low resolution mass spectroscopy): Waters Acquity HSS T3, 2.1 mm×50 mm; C18, 1.7 μm; Mobile Phase: A: 0.1% formic acid in water (v/v); Mobile phase B: 0.1% formic acid in acetonitrile v/v); Flow-1.25 ml/minute; Initial conditions: A-95%:B-5%; hold at initial from 0.0-0.1 minute; Linear Ramp to A-5%:B-95% over 0.1-2.6 minute; hold at A-5%:B-95% from 2.6-2.95 minute; return to initial conditions 2.95-3.0 minute.

### 5-carboxypentyl 5,9,16,22-tetraoxo-11,11-bis{[3-oxo-3-({3-[(5-{[3,4,6-tri-O-acetyl-2-(acetylamino)-2-deoxy-β-D-galactopyranosyl]oxy}pentanoyl)amino]propyl}amino)propoxy]methyl}-26-{[3,4,6-tri-O-acetyl-2-(acetylamino)-2-deoxy-β-D-galactopyranosyl]oxy}-13-oxa-4,10,17,21-tetraazahexacos-1-yl phosphate

[chemical structure]

[1821] Reaction Scheme:

[chemical structure]

[1822] Step 1: 6-Hydroxyhexanoate. A mixture of sodium hydroxide (9.02 g, 226 mmol) and 6-hexanolactone (25 mL, 0.23 mmol) in water (401 mL) was heated at 70° C. overnight. TLC showed complete consumption of the starting material. The water was removed carefully at 50° C. with a rotary evaporator and the resulting white solid was azeotroped with toluene. After drying under high vacuum overnight, the solid was suspended in acetone (100 mL) and tetrabutylammonium bromide (3.64 g, 11.3 mmol) and benzyl bromide (32.2 mL, 271 mmol) were added. The reaction mixture was heated at reflux until TLC analysis showed complete consumption of intermediate carboxylic acid (96 h). The solvent was removed in vacuo and the residue was partitioned between aqueous hydrochloric acid and ethyl acetate. The aqueous layer was extracted with ethyl acetate (×2). The combined organic extracts were washed with saturated sodium bicarbonate (×2), brine, dried over magnesium sulfate, filtered and concentrated in vacuo. The crude residue was purified by a silica gel plug (20-70% ethyl acetate in heptane) to afford the title compound as a colorless oil (43.9 g, 88%). ¹H NMR (600 MHz, CDCl₃) δ ppm 7.40-7.30 (m, 5H), 5.12 (s, 2H), 3.63 (t, 2H), 2.38 (t, 2H), 1.73-1.65 (m, 2H), 1.62-1.53 (m, 2H), 1.44-1.35 (m, 2H), 1.28 (brs., 1H).

[1823] Step 2: Benzyl 6-(((3-((tert-butoxycarbonyl)amino)propoxy)(2-cyanoethoxy)phosphoryl)oxy)hexanoate. To a solution of 2-cyanoethyl N,N-diisopropylchlorophosphoramidite (20.3 g, 67.5 mmol) in anhydrous di chloromethane (150 mL) at 0° C. was slowly added 4,5-dicyanoimidazole (1 M acetonitrile, 31.5 mL, 31.5 mmol) at 0° C. 6-hydroxyhexanoate (10.0 g, 45.0 mmol) was then added dropwise to the mixture at 0° C. under an inert atmosphere. The mixture was stirred at 0° C. until TLC analysis showed consumption of starting material (1 h). The reaction was quenched with saturated sodium bicarbonate (80 mL). The biphasic mixture was then separated and the aqueous layer was extracted with dichloromethane (2×60 mL). The combined organic phase was washed with brine, dried over anhydrous sodium sulfate, filtered and concentrated to dryness to give the crude product (23.0 g, >100%) as a light yellow oil, which was used in the next step directly. This crude material was dissolved in acetonitrile (50 mL) and added dropwise over 10 min to a solution of 3-(Boc-amino)-1-propanol (10.0 g, 57.2 mmol) and tetrazole (19.1 g, 272 mmol) in anhydrous acetonitrile (300 mL). The resulting colorless solution was stirred at ambient temperature for. 1.5 h. TLC showed the starting material was consumed completely. Then a solution of I₂ (0.4 M in THF/H₂O/pyridine (78:20:2), 90 mL, 54.4 mmol) was added slowly to the above reaction mixture and at the end of the addition the brown color didn't dissipate. The mixture was stirred at ambient temperature until TLC analysis showed the reaction was complete (1 h). The mixture was quenched with saturated sodium sulfite and concentrated in vacuo to remove the organic solvents. The remaining mixture was diluted with water and extracted with ethyl acetate (×2). The combined organic phase was washed with saturated ammonium chloride and brine, dried over anhydrous sodium sulfate, filtered and concentrated in vacuo. The crude material was purified by silica gel flash chromatography (20-75 ethyl acetate in petroleum ether) to afford the title compound as colorless oil (10.0 g, 43% over three steps). ¹H NMR (400 MHz, CDCl₃) δ ppm 7.41-7.28 (m, 511), 5.11 (s, 2H), 4.23 (ddd, 2H), 4.18-4.04 (m, 4H), 3.2.4 (q, 2H), 2.75 (ddd, 2H), 2.38 (t, 2H), 1.87 (dq, 2H), 1.76-1.64 (m, 4H), 1.43 (s, 9H), 1.31-1.20 (m, 2H).

[1824] Step 3: 3-Ammoniopropyl (6-(benzyloxy)-6-oxohexyl) phosphate. To a solution of benzyl 6-(((3-((tert-butoxycarbonyl)amino)propoxy)(2-cyanoethoxy)phosphoryl)oxy)hexanoate (9.00 g, 17.6 mmol) in anhydrous 1,4-dioxane (36 mL) was added hydrochloric acid (100 mL, 400 mmol, 4 M in dioxane) dropwise at 0° C. The resulting colorless solution was stirred at ambient temperature for 1.5 h. The mixture was concentrated to dryness to give the crude product (7.90 g) as a colorless gum, which was used in the next step directly. To a solution of this crude material acetonitrile (72 mL) was added triethylamine (36 mL. 0.26 mmol). The resulting white suspension was stirred at 25° C. for 16 h. The mixture was then concentrated and the crude material was purified by silica gel flash chromatography (5-50% methanol in dichloromethane, 1% ammonium hydroxide) to afford the title compound as a white solid (3.70 g, 59% over two steps). ¹H NMR (400 MHz, CD₃OD) δ ppm 7.41-7.27 (m, 5H), 5.11 (s, 2H), 3.95 (dt, 2H), 3.85 (q, 2H), 3.08 (t, 2H), 2.39 (t, 2H), 1.94 (dq, 2H), 1.78-1.56 (m, 4H), 1.51-1.34 (m, 2H). LCMS (m/z) for C₁₆H₂₇NO₆P⁺ (M+H)⁺ 360.1; retention time=0.677 min(UPLC 1.5 min method).

[1825] Step 4: 6-(Benzyloxy)-6-oxohexyl 26-{[4,6-di-O-acetyl-2-(acetylamino)-2-deoxy-β-D-galactopyranosyl]oxy}-5,9,16,22-tetraoxo-11,11-bis{[3-oxo-3-({3-[(5-{[3,4,6-tri-O-acetyl-2-(acetylamino)-2-deoxy-β-D-galactopyranosyl]oxy}pentanoyl)amino]propyl}amino)propoxy]methyl}-13-oxa-4,10,17,21-tetraazahexacos-1-yl phosphate. A solution of N,N-diisopropylethylamine (305 mg, 2.36 mmol, 0.41 mL) and 3-ammoniopropyl 6-(benzyloxy)-6-oxohexyl phosphate (297 mg, 0.825 mmol) in N,N-dimethylformamide (5 mL) was added to a solution of 18,18-bis(17-((1S,2R,3R,4R,5S)-4-acetamido-2,3-dihydroxy-6,8-dioxabicyclo[3.2.1]octan-1-yl)-5,11-dioxo-2,16-dioxa-6,10-diazaheptadecyl)-1-((1 S,2R,3R,4R,5S)-4-acetamido-2,3-dihydroxy-6,8-dioxabicyclo[3.2.1]octan-1-yl)-7,13,20-trioxo-2,16-dioxa-8,12,19-triazatetracosan-24-oic acid (1.50 g, 0.790 mmol) in DMF (10 mL). 1-[Bis(dimethylamino)methylene]-1H-1,2,3-triazolo[4,5-b]pyridinium3-oxid hexafluorophosphate (328 mg 0.065 mmol) was then added to the reaction mixture at room temperature. After 1 h, the reaction was quenched with saturated ammonium chloride (30 mL) and extracted with dichloromethane (4×30 mL). The combined organic layers were washed with brine, dried over sodium sulfate, filtered and concentrated. The crude product was taken forward without further purification. LCMS (m/z) for C₉₈H₁₅₅N₁₁O₄₃PNa²⁺ (M+2Na)²⁺1125.5; retention time=0.71 min (UPLC 1.5 min method).

[1826] Step 5: Example 29. The crude tris-benzyl ester 6-(benzyloxy)-6-oxohexyl 26-{[4,6-di-O-acetyl-2-(acetylamino)-2-deoxy-beta-D-galactopyranosyl]oxy}-5,9,16,22-tetraoxo-11,11-bis {[3-oxo-3-({3-[(5-{[3,4,6-tri-O-acetyl-2-(acetylamino)-2-deoxy-β-D-galactopyranosyl]oxy}pentanoyl)amino]propyl}amino)propoxy]methyl}-13-oxa 4,10,17,21-tetraazahexacos-1-yl phosphate (1.77 g, 0.790 mmol) was dissolved in methanol (0.05 M) and hydrogenated using an H-cube (10% Pd/C with a flow rate of 1.0 mL/min under full H₂ at 60° C.). Product was obtained cleanly and the bulk material was purified by preparatory HPLC [Column: Phenomenex Gemini XB C18 150 mm×3.0 mm 5 μm. Gradient conditions: mobile phase A=0.1% 10 mM triethylammonium acetate pH7 in water, mobile phase B=0.1% 1.0 mM triethylammonium acetate pH7 in acetonitrile (22-100-22% B/A, 27.0 mL/min)]. The bulk material was obtained as a white solid containing triethylammonium acetate (14 equiv. by NMR integration) (475 mg). The purity of the product was calculated to be 49 wt % and the yield was determined to be 233 mg (14%) ¹H NMR (600 MHz, CD₃OD) δ 5.34 (d, 3H), 5.07 (dd, 3H), 4.57 (d, 3H), 4.22-4.05 (m, 9H), 4.02 (t, 3H), 3.94-3.81 (m, 7H), 3.72-3.63 (m, 12H), 3.54 (dt, 3H), 3.35 (s, 6H), 3.26-3.20 (m, 17H), 3.19 (q, 84H, triethylammonium acetate), 2.43 (t, 6H), 2.30-2.17 (m, 13H), 2.14 (s, 9H), 2.03 (s, 9H), 1.9.5 (s, 9H), 1.93 (s, 9H), 1.93 (s, 42H, triethylammonium acetate), 1.90-1.78 (m, 4H), 1.74-1.57 (m, 22H), 1.49-1.38 (m, 2H), 1.30 (t, 126H). LCMS (m/z) for C₉₃H₁₅₄N₁₁O₄₄P²⁺ (M+2H)²⁺1080.5; retention time: 0.65 min (UPLC 1.5 min method).

### 18-{[27-({(2R,3R,4R,5R,6R)-3-(acetylamino)-4,5-bis(acetyloxy)-6-[(acetyloxy)methyl]tetrahydro-2H-pyran-2-yl}oxy)-12,12-bis({3-[(3-{[5({(2R,3R,4R,5R,6R)-3-(acetylamino)-4,5-bis(acetyloxy)-6-[(acetyloxy)methyl]tetrahydro-2H-pyran-2-yl}oxy)pentanoyl]amino}propyl)amino]-3-oxopropoxy}methyl)-6,10,17,23-tetraoxo-14-oxa-5,11,18,22-tetraazaheptacosan-1-oyl]amino}-43-carboxy-18-(25-carboxy-19,19-dioxido-5-oxo-2,9,12,15,18,20-hexaoxa-6-aza-19-λ˜5˜-phosphapentacos-1-yl)-37,37-dioxido-13,23-dioxo-3,6,9,16,20,27,30,33,36,38-decaoxa-12,24-diaza-37-λ˜5˜-phosphatrietracont-1-yl 5-carboxypentyl phosphate

[chemical structure]

[chemical structure]

[chemical structure]

[chemical structure]

[chemical structure]

[1828] Step 1: Benzyl 6-4(2-(2-(2-(2-aminoethoxy)ethoxy)ethoxy)ethoxy)(2-cyanoethoxy)phosphoryl)oxy)hexanoate. This compound was prepared from ten-butyl (2-(2-(2-(2-hydroxyethoxy)ethoxy)ethoxy)ethyl)carbaminate (6.03 g, 20.5 mmol) and 2-cyanoethyl-N,N-diisopropylchlorophosphoramidite (6.87 mL, 30.8 mmol) and 6-Hydroxyhexanoate (6.85 g, 30.8 mmol) in an analogous manner to Example 29, Step 2. The title compound was obtained after purification by silica gel flash chromatography (50-100% ethyl acetate in heptanethen 5% methanol, in ethyl acetate) as a yellow oil (8.64 g, 67% over three steps). ¹H NMR (400 MHz, CDCl₃) 5 ppm 7.40-7.31 (m, 5H), 5.11 (s, 2H), 5.04 (s, 4.31-4.15 (m, 4H), 4.08 (q, 2H), 3.71 (ddd, 2H), 3.69-3.58 (m, 8H), 3.53 (t, 211), 3.31 (q, 2H), 2.77 (t, 2H), 2.37 (t, 2H), 1.76-1.63 (m, 4H), 1.44 (s, 9H), 1.48-1.36 (m, 2H). LCMS (m/z) for C29H₄₇N₂NaO₁₁P⁺ (M+Na)⁺ 653.5; retention time=0.93 min (UPLC 1.5 min method).

[1829] Step 2: 2-(2-(2-(2-((((6-(Benzyloxy)-6-oxohexyl)oxy)(2-cyoethoxy)phosphoryl)oxy)ethoxy)ethoxy)ethoxy)ethan-1-aminium chloride. To a solution of benzyl 6-(((2-(2-(2-(2-aminoethoxy)ethoxy)ethoxy)ethoxy)(2-cyanoethoxy)phosphoryl)oxy) hexanoate (8.64 g, 14.1 mmol) in 1,4-dioxane (33 mL) at 0° C. was added a solution of hydrochloric acid (4 M 1,4-dioxane. 87 mL, 348 mmol). The resulting mixture was stirred at ambient temperature for 1 h. The solvent was removed in vacuo to yield 8.76 g (>100%) title compound as a yellow oil. The crude product was used without further purification. ¹H NMR (400 MHz, CD₃OD) S ppm. 7.4.5-7.26 (m, 5H), 5.12 (s, 2H), 4.29-4.19 (m, 4H), 4.12 (q, 2H), 3.79-3.69 (m, 4H), 3.67 (m, 8H), 3.13 (t, 2H), 2.88 (ddd, 2H), 2.41 (t, 2H), 1.81-1.59 (m, 4H), 1.51-1.37 (m, 2H). LCMS (ink) for C₂₄H₄₀N₂O₄P⁺ (M+H)⁺ 531.5; retention time=0.70 min (UPLC 1.5 min method).

[1830] Step 3: Pentafluorophenyl 4-[(tert-butoxycarbonyl)amino]butanoate. To a solution of 4-(tert-butoxycarbonylamino)butyric acid (12.0 g, 59.0 mmol) in dichloromethane was added N,N-diisopropylethylamine (20.6 mL, 118 mmol) at ambient temperature followed by pentafluorophenyl trifluoroacetate (12.2 mL, 70.9 mmol) at 0° C. The reaction mixture was warmed to ambient temperature and stirred for 17 h. The reaction mixture was then concentrated. Purification of the crude material by silica gel flash chromatography (10-60% ethyl acetate in heptane) afforded the title compound as a white solid (19.1 g, 88%). ¹H NMR (400 MHz, CDCl₃) δ ppm 4.65 (s, 1H), 3.25 (q, 2H), 2.72 (t, 2H), 1.96 (p, 2H), 1.45 (s, 9H). LCMS (m/z) for C₁₋₅H₁₆F₅NNaO₄⁺ (M+Na)⁺392.3; retention time=1.01 min (UPLC 1.5 min method).

[1831] Step 4: tert-Butyl 11,11-bis[(3-tert-butoxy-3-oxopropoxy)methyl]-2,2-dimethyl-4,9-dioxo-3,13-dioxa 5,10-diazahexadecan-16-oate. N,N-diisopropylethylamine (13.0 g, 101 mmol, 17.6 mL) was added to a solution of pentafluorophenyl4-[(tert-butoxycarbonyl)amino]butanoate (9.68 g, 26.2 mmol) in THF (25 mL). tert-Butyl 3-{2-amino-3-(3-tert-butoxy-3-oxopropoxy)-2-[(3-tert-butoxy 3-oxopropoxy)methyl]propoxy}propanoate¹ (10.2 g, 20.2 mmol) was then added to the reaction in a slow stream as a solution in THF (50 mL) and the reaction was stirred at 50° C. for 78 h. The reaction was concentrated and purified twice by silica gel chromatography (0-20% methanol in dichloromethane and again 0-100% ethyl acetate in heptane) to afford the title compound as a colorless oil (1.3.3 g, 95%). ¹H NMR (400 MHz, CDCl₃) δ ppm 6.27-6.13 (m, 1H), 5.02-4.84 (m, 1H), 3.70 (s, 6H), 3.64 (t, 6H), 3.16 (q, 2H), 2.45 (t, 6H), 2.20 (t, 2H), 1.78 (q urn, 2H), 1.45 (s, 36H). ¹ This corn pound was prepared according to a reported literature procedure: Cardonna, C. M.; Gawley, R. E. J. Org. Chem. 2002, 67, 1411.

[1832] Step 5: 11,11-bis[(2-carboxyethoxy)methyl]-2,2-dimethyl-4,9-dioxo-3,13-dioxa-5,10-diazahexadecan-16-oic acid. Trifluoroacetic acid (46 g, 0.40 mol, 30 mL) was added to a solution of tert-butyl 11,11-bis[(3-tert-butoxy-3-oxopropoxy)methyl]-2,2-dimethyl-4,9-dioxo-3,13-dioxa-5,10-diazahexadecan-16-oate (13.3 g, 19.2 mmol) dichloromethane (100 mL) and the resulting solution was stirred at room temperature. After 20 h, the reaction mixture was concentrated. The resultant residue was then suspended in a mixture of tetrahydrofuran (30 mL) and saturated aqueous sodium bicarbonate (160 mL) to which was added di-tert-butyl dicarbonate (12.6 g, 57.7 mmol). The resultant suspension was heated to 40° C. Two additional aliquots of di-tort-butyl dicarbonate (3.70 g, 17.0 mmol earn), were added to the reaction mixture, one at 30 min and then second at 90 min and the reaction was allowed to stir at 40° C. After 20 h, the reaction mixture was washed once with ethyl acetate and the wash was discarded. The pH of the aqueous layer was adjusted to pH=3 with 1 N hydrochloric acid. The aqueous layer was then extracted with ethyl acetate (×2) and the combined extracts were dried over magnesium sulfate, filtered, and concentrated to afford the title compound as a colorless oil which was used in the subsequent step without purification. ¹H NMR (400 MHz, CD₃OD) δ ppm 4.45-4.30 (m, 12H), 3.70 (q, 2H), 3.23 (t, 6H), 2.84 (t, 2H), 2.34 (quin, 2H), 2.18 (s, 9H).

[1833] Step 6: Pentafluorophenyl 3-(2-[(4-aminobutanoyl)amino]-3-[3-oxo-3-(pentafluorophenoxy)propoxy]-2-{[3-oxo-3-(pentafluorophenoxy)propoxy]methyl}propoxy)propanoate. N,N-diisopropylethylamine (17.0 g, 132 mmol, 23.0 mL) was added to a solution of 11,11-bis[(2-carboxyethoxy)methyl]-2,2-dimethyl-4,9-dioxo 3,13-dioxa-5,10-diazahexadecan-16-oic acid (7.49 g, 13.0 mmol) in N,N-dimethylformamide (100 mL). Pentafluorophenyl trifluoroacetate (20.4 g, 72.7 mmol, 12.5 mL) was then added to the reaction mixture dropwise over 1.5 min resulting in a light pink solution that turned yellow over time. After 1 h, the reaction was quenched with saturated sodium bicarbonate. The resultant mixture was extracted with ethyl acetate (×2). The combined organic extracts were washed with brine, dried over sodium sulfate, filtered, and concentrated. The resultant residue was purified by silica gel chromatography (0-80% ethyl acetate in heptane) to afford the title compound as a colorless oil (8.76 g, 63% over 2 steps). H NMR (400 MHz, (CD₃)₂S0) S ppm 7.10 (s, 1H), 6.73 (t, 1H), 3.70 (t, 6H), 3.64 (s, 6H), 2.98 (t, 6H), 2.87 (q, 2H), 2.03 (t, 2H), 1.53 (quin, 210, 1.36 (s, 9H).

[1834] Step 7: Dibenzyl 27-({4-[(tert-butoxycarbonyl)amino]butanoyl}amino)-8,46-bis(2-cyanoethoxy)-27-[19-(2-cyanoethoxy)-19-oxido-5,26-dioxo-28-phenyl-2,9,12,15,18,20,27-heptaoxa-6-aza-19-λ˜5˜-phosphaoctacos-1-yl]-22,32-dioxo-7,9,12,15,18,25,29,36,39,42,45,47-dodecaoxa-21,33-diaza-8,46-diphosphatripentacontane-1,53-dioate 8,46-dioxide. Both of the starting materials were azeotroped with toluene twice and placed under high vacuum overnight prior to use. To a solution of pentafluorophenyl 3-(2-[(4-aminobutanoyl)amino]-3-[3-oxo-3-(pentafluorophenoxy)propoxy]-2-{[3-oxo-3-(pentafluorophenoxy) propoxy]methyl}propoxy)propanoate (3.97 g, 3.89 mmol) in dichloromethane (15 mL) was added N,N-diisopropylethylamine (6.8 mL, 39 mmol). Then a solution of 2-(2-(2-(2-((((6-(Benzyloxy)-6-oxohexyl)oxy)(2-cyanoethoxy)phospho yl)oxy)ethoxy)ethoxy)ethoxy)ethan-1-aminium chloride (8.76 g crude, 14.0 mmol) in dichloromethane (25 mL) was added at 0° C. The reaction mixture was warmed to ambient temperature and stirred until TLC analysis showed consumption of starting material (15 h). The solvent was removed in vacuo, and the residue was redissolved in ethyl acetate. The solution was washed with water, saturated sodium bicarbonate and then water again, and the combined aqueous layers were extracted with ethyl acetate once. The combined organic extracts were dried with magnesium sulfate, filtered and concentrated in vacuo. The crude material was purified by silica gel flash chromatography (0-22% methanol in dichloromethane) to afford the title compound as a colorless gum (3.23 g, 40%). ¹H NMR (400 MHz, CDCl₃) δ ppm 7.38-7.30 (m, 15H), 6.71 (s, 3H), 6.52 (s, 1H), 5.19 (t 1H), 5.11 (s, 6H), 4.3/4.14 (m, 12H), 4.08 (q, 6H), 3.76-3.60 (m, 42H), 3.55 (t, 6H), 3.43 (q, 6H), 3.14 (dd, 2H), 2.77 (t, 6H), 2.42 (t, 6H), 2.38 (t, 6H), 2.23 (t, 2H), 1.79-1.64 (m, 14H), 1.46-1.38 (m, 15H). LCMS (m/z) for C₉₄H₁₅₁F₅N₈O₃₆P₃²⁺ (M+2H)²⁻ 1031.0; retention time=1.00 min (UPLC 1.5 min method).

[1835] Step 8: 29-[(4-Ammoniobutanoyl)amino]-29-(19,19-dioxido-5,26-dioxo-28-phenyl-2,9,12,15,18,20,27-heptaoxa-6-aza-19-ξ˜5˜-phosphaoctacos-1-yl)-10,10-dioxido-3,24,34-trioxo-1-phenyl-2,9,11,14,17,20,27,31,38,41,44-undeca oxa-23,35-diaza-10-λ˜5˜-phosphahexatetracontan-46-yl 6-(benzyloxy)-6-oxohexyl phosphate. To a solution of dibenzyl 27-({4-[(tert-butoxycarbonyl)amino]butanoyl}amino)-8,46-bis(2-cyanoethoxy)-27-[19-(2-cyanoethoxy)-19-oxido-5,26-dioxo-28-phenyl-2,9,12,15,18,20,27-heptaoxa 6-aza-19-λ˜5˜-phosphaoctacos-1-yl]-22,32-dioxo-7, 9,12,15,18,25,29, 36, 39,42,45,47-dodecaoxa-21,33-diaza-8,46-diphosphatripentacontane-1,53-dioate 8,46-dioxide (3.22 g, 1.56 mmol) in 1,4-dioxane (18 mL) at 0° C. was added a solution of hydrochloric acid (4 M in 1,4-dioxane, 16 mL, 63 mmol). The resulting mixture was stirred at ambient temperature for 1 h. The solvent was then removed to provide an oily residue. This crude was suspended in acetonitrile (1.8 mL) and triethylamine (12 mL, 86 mmol) was added. The reaction mixture was stirred at ambient temperature for 40 h and subsequently concentrated in vacuo. The crude material was purified by reverse phase HPLC with a Phenomenex NX-C18 column (5-100% acetonitrile in water, containing 0.1% sodium hydroxide) and lyophilized to provide the title compound as a colorless oil (1.33 g, 47% over two steps). ¹H NMR (400 MHz, CD₃OD) δ ppm 7.41-1.27 (m, 15H), 5.11 (s, 6H), 4.03-3.92 (m, 6H), 3.85 (q, 6H), 3.71-3.58 (m, 42H), 3.55 (t, 6H), 3.38 (t, 6H), 2.99 (t, 2H), 2.44 (t, 6H), 2.42-2.29 (m, 8H), 1.92 (p, 2H), 1.72-1.57 (m, 12H), 1.48-1.37 (m, 6H). LCMS (m/z) for C₈₀H₁₃₄N₅O₃₄P₃²⁺ (M+2H)⁺ 901.5; retention time=0.77 min (UPLC 1.5 min method).

[1836] Step 9: 29-{[27-({(2R,3R,4R,5R,6R) 3-(acetylamino)-4,5-bis(acetyloxy)-G-[(acetyloxy)methyl]tetrahydro-2H-pyran-2-yl}oxy)-12,12-bis({3-[(3-{[5-({(2R,3R,4R,5R,6R)-3-(acetylamino)-4,5-bis(acetyloxy)-6-[(acetyloxy)methyl]tetrahydro-2H-pyran-2-yl}oxy)pentanoyl]amino}propyl)amino]-3-oxopropoxy}methyl)-6,10,17,23-tetraoxo-14-oxa-5,11,18,22-tetraazaheptacosan-1-oyl]amino}-29-(19,19-dioxido-5,26-dioxo-28-phenyl 2, 9,12,15,18,2027-heptaoxa-6-aza-19-λ˜5˜-phosphaoctacos-1-yl)-10,10-dioxido-3,24,34-trioxo-1-phenyl-2,9,11,14,17,20,27,31,38,41,44-undecaoxa-23,35-diaza-10-λ˜5˜-phosphahexatetracontan-46-yl 6-(benzyloxy)-6-oxohexyl phosphate. Both of the starting materials were azeotroped with toluene three times and placed under high vacuum overnight before use. To a solution of the amine 29-[(4-ammoniobutanoyl)amino]-29-(19,19-dioxido-5,26-dioxo-28-phenyl-2,9,12,15,18,20,27-heptaoxa-6-aza-19-λ˜5˜-phosphaoctacos-1-yl)-10,10-dioxido-3,24,34-trioxo-1-phenyl-2,9,11,14,17,20,27,31,38,41,44-undecaoxa-23,35-diaza-10-λ˜5˜-phosphahexatetracontan-46-yl 6-(benzyloxy)-6-oxohexyl phosphate (270 mg, 0.147 mmol) in anhydrous dimethylformamide (0.5 mL) was added 18,18-bis(17-((1 S,2R,3R,4R,5S)-4-acetamido-2,3-dihydroxy-6,8-dioxabicyclo[3.2.1]octan-1-yl)-5,11-dioxo-2,16-dioxa-6,10-diazaheptadecyl)-1-((1 S,2R,3R,4R,5S)-4-acetamido-2,3-dihydroxy-6,8-dioxabicyclo[3.2.1]octan-1-yl)-7,13,20-trioxo-2,16-dioxa-8,12,19-triazatetracosan-24-oic acid (337 mg, 0.177 mmol) in dimethylfomamide (0.1.5 mL), N,N-diisopropylethylamine (0.21 mL, 1.18 mmol) and then Propylphosphonic anhydridesolution (50 wt. % in ethyl acetate, 0.26 mL, 0.44 mmol). The reaction mixture was stirred at 50° C. for 17 h. Upon cooling to ambient temperature, water was added and the mixture was extracted with 85:15 CH₂Cl₂:i-PrOH (100 mL×3). The organic extracts were dried over sodium sulfate, filtered and concentrated in vacuo. The crude material was purified by reverse phase HPLC with a Phenomenex NX-C18 column (35-100 acetonitrile in water, containing 10 mM triethylammonium acetate) and freeze dried to provide 202 mg of the desired product containing triethylammonium acetate (12.3 equiv. based on ¹H NMR integration). The purity of this product was calculated to be 66 wt % and the yield was determined to be 133 mg (24%). This material was used in the next step without further purification. ¹H NMR (400 MHz, CD₃OD) δ ppm 7.43-7.24 (m, 15H), 5.33 (d, 3H), 5.11 (s, 6H), 5.07 (dd, 3H), 4.57 (d, 3H), 4.22-3.80 (m, 25H), 3.75-3.57 (m, 59H), 3.57-3.47 (m, 12H), 3.41-3.34 (m, 0.12H), 3.20 (q, 74H, triethylammonium acetate), 2.48-2.35 (m, 18H), 2.27-2.17 (m, 12H), 2.14 (s, 9H), 2.02 (s, 9H), 1.96, (s, 111H, triethylammonium acetate) 1.95 (s, 9H), 1.93 (s, 9H), 1.77-1.54 (m, 33H), 1.44 (m 9H), 1.31 (1; 111H, triethylammonium acetate). LCMS (m/z) for C₁₄₆H₂₆₆N₁₅O₇₂P₃²⁺ (M+2H)²¹ 1845.8; retention time=1.07 min (UPLC 3 min method).

[1837] Step 10: Example 30. A mixture of 29-{[27-({(2R,3R,4R,5R,6R) 3-(acetylamino)-4,5-bis(acetyloxy)-6-[(acetyloxy)methyl]tetrahydro-2H-pyran-2-yl}oxy)-12,12-bis({3-[(3-{[5-({(2R,3R,4R,5R,6R)-3-(acetylamino)-4,5-bis(acetyloxy)-6-[(acyloxy)methyl]tetrahydro-2H-pyran-2-yl}oxy)pentanoyl]amino}propyl)amino]-3-oxopropoxy}methyl)-6,10,17,23 tetraoxo-14-oxa-5,11,18,22-tetraazaheptacosan-1-oyl]amino}-29-(19,19-dioxido-5,26-dioxo-28-phenyl 2,9,12,15,18,20,27-heptaoxa 6-aza-19-λ˜5˜-phosphaoctacos-1-yl)-10,10-dioxido-3,24,34-trioxo-1-phenyl-2,9,11,14,17,20,27,31,38,41,44-undecaoxa-23,35-diaza-10˜λ˜-5˜-phosphahexatetracontan-46-yl 6-(benzyloxy)-6-oxohexyl phosphate (200 mg, 0.0330 mmol, 66 wt %) and 10% palladium on carbon (7.0 mg 0.0066 mmol) in methanol (2 mL) was stirred under hydrogen pressure (50 psi) at 25° C. for 20 h. The catalyst was filtered through. 0.45 urn nylon acrodisc, and washed with methanol (40 mL). The filtrate was then concentrated and the resulting oil was dissolved in 1:1 mixture of acetonitrile and water (22 mL), adjusted to pH 5.70 by hydrochloric acid (1 N). The solution was lyophilized overnight to afford the title compound as a hygroscopic white solid (13 equiv triethylamine hydrochloride salt) (110 mg, 59%). ¹H NMR (600 MHz, CD₃OD) δ ppm 5.34 (d, 3H), 5.07 (dd, 3H), 4.57 (d, 3H), 4.20-3.91 (m, 14H), 3.93-3.84 (m, 9H), 3.75-3.62 (m, 63H), 3.60-3.50 (m, 10H), 3.43-3.35 (m, 8H), 3.27-3.14 (m, 80H, triethylamine hydrochloride), 3.12-2.90 (m, 2H), 2.57-2.38 (m, 12H), 2.30-2.20 (m, 18H), 2.14 (s, 9H), 2.03 (s, 9H), 1.95-1.94 (m, 18H), 1.89-1.83 (m, 1H), 1.73-1.55 (m, 34H), 1.46-1.40 (m, 9H), 1.31 (t, 120H, triethylamine hydrochloride). LCMS (m/z) for C₁₄₃H₂₄₉N₁₅O₇₂P₃³⁺ (M+3H)³⁺1141.2; retention time=1.06 min (UPLC 3 min method).

### 1-[(1S,2R,3R,4R,5S)-4-(acetylamino) 2,3-bis(acetyloxy)-6,8-dioxabicyclo[3.2.1]oct-1-yl]-18,18-bis{17-[(1 S,2R,3R,4R,5S)-4-(acetylamino)-2,3-bis(acetyloxy)-6,8-dioxabicyclo[3.2.1]oct-1-yl]-5,11-dioxo-2,16-dioxa-6,10-diazaheptadec-1-yl}-7,13,20-trioxo-2,16-dioxa-8,12,19-triazahentriacontan-31-oic acid

[chemical structure]

[chemical structure]

[1839] Step 1: tert-Butyl 5-iodopentanoate. To a solution of tert-butyl 5-bromopentanoate (60.0 g, 250 mmol) in acetone (400 mL) was added sodium iodide (94.8 g, 633 mmol). The reaction mixture was stirred at 57° C. for 4 h, cooled to room temperature, filtered and washed with dichloromethane. The solvent was evaporated under reduced pressure to give a residue which was dissolved dichloromethane, washed with saturated sodium bicarbonate (200 mL) and brine (100 mL). The separated organic phase was dried over sodium sulfate, filtered, and concentrated to afford the title compound as a yellow oil (69.3 g, 100%). ¹H NMR (600 MHz, CDCl₃) δ ppm 3.20 (t, 2H), 2.25 (t, 2H), 1.86 (p, 2H), 1.70 (p, 2H), 1.45 (s, 9H).

[1840] Step 2: tert-Butyl 5-{[(1S,2R,6R,7R,8S)-7-(acetylamino)-4,4-dimethyl-3,5,9,11-tetraoxatricyclo[6.2.1.0˜2,6˜]undec-1-yl]methoxy}pentanoate. To a solution of tert-butyl 5-iodopentanoate (59 g, 0.21 mol) and N-((3aR,4S,7S,8R,8aR)-4-(hydroxymethyl)-2,2-dimethylhexahydro-4,7-epoxy[1,3]dioxolo[4,5-d]oxepin-8-vi)acetamide (20 g, 69 mmol) in dichloromethane (210 mL) was added tetrabutylammonium hydrogensulfate (35.3 g, 104 mmol) followed by 12.5 M sodium hydroxide solution (160 mL) in an ice bath. The reaction mixture was stirred at room temperature for 24 h. The reaction mixture was partitioned between dichloromethane (200 mL) and water (200 mL). The separated organic phase was washed by 1 N hydrochloric acid (300 mL), dried over sodium sulfate, filtered, and concentrated. The crude was triturated in diethyl ether (500 mL) at ambient temperature for 30 min. The resultant solid was removed by filtration and the filter cake was rinsed by diethyl ether (100 mL). The filtrate was concentrated, and dried in vacuo overnight to afford the crude of the title compound as a yellow oil (50.9 g, 45.5 wt % pure determined by qNMR with 1,3,5-trimethoxyben as the internal standard) which was used in next step without purification. LCMS (m/z) for C₂₁H₃₆NO₈⁺ (M+H)⁺ 430.3; retention time=0.88 min (UPLC 1.5 min method).

[1841] Step 3: tert-Butyl 5-{[(1 S,2R,3R,4R,5S)-4-(acetylamino)-2,3-dihydroxy-6,8-dioxabicyclo[3.2.1]oct-1-yl]methoxy}pentanoate. To an ice cold solution of the crude of tert-butyl 5 {[(1 S,2R,6R,7R,8S)-7-(acetylamino)-4,4-dimethyl-3,5,9,11-tetraoxatricyclo[6.2.1.0˜2,6˜]undec-1-yl]methoxy}pentanoate (50.9 g, 45.5 wt %, 53.9 mmol) in tetrahydrofuran (105 mL) was added a solution of concentrated hydrochloric acid (16 mL) in water (49 mL) via addition funnel over 5 min. The reaction solution was stirred at room temperature under nitrogen for 6 h. The reaction mixture was diluted with 2-methyl-tetrahydrofuran (300 mL) and washed with brine (100 mL). The aqueous phase was extracted with dichloromethane (300 mL). Each separated organic phase was washed by a mixture of saturated sodium bicarbonate (75 mL) and brine (75 mL), then brine (120 mL). The organic phases were combined, dried over sodium sulfate, filtered, concentrated, and azeotroped by heptane (100 mL) followed by methyl-t-butyl-ether (100 mL). The resulting crude was triturated in methyl-t-butyl-ether (200 mL) at room temperature for 15 min. The resulting precipitate was collected by filtration, rinsed with methyl-t-butyl-ether (200 mL), and dried in vacuo to afford the title compound as white solid (17.9 g, 66% over 2 steps).

[1842] ¹H NMR (400 MHz, CDCl₃) δ ppm 5.79 (d, 1T-1), 5.36 (d, 1H), 4.07-3.88 (m, 4H), 3.79-3.62 (m, 4H), 3.60-3.46 (m, 2H), 3.37 (d, 1H), 2.30-2.19 (m, 2H), 2.07 (s, 3H), 1.75-1.51 (m, 4H), 1.45 (s, 9H). LCMS (m/z) for C₁₈H₃₂NO₈⁺ (M+H)⁺ 390.5; retention time=0.70 min (UPLC 1.5 min method).

[1843] Step 4: tert-Butyl 5-{[(1S,2R,3R,4R,5S)-4-(acetylamino)-2,3-bis(acetyloxy)-6,8-dioxabicyclo[3.2.1]oct-1-yl]methoxy}pentanoate. Acetic anhydride (18.7 g, 183 mmol) was added dropwise to an ice cold solution of tert-butyl. 5-{[(1 S,2R,3R,4R,5S)-4-(acetylamino)-2,3-dihydroxy-6,8-dioxabicyclo[3.2.1]oct-1-yl]methoxy}pentanoate (18.6 g, 49.7 mmol) and pyridine (14.0 g, 183 mmol), and dimethylaminopyridine (1.12 g, 9.16 mmol) in dichloromethane (150 mL). The mixture was stirred at room temperature for 2.5 h. The reaction mixture was quenched by hydrochloric acid (1 N, 150 mL) and extracted with dichloromethane (200 mL). The organic phase was washed with hydrochloric acid (1 N, 150 mL), saturated sodium bicarbonate (150 mL) dried over sodium sulfate, concentrated, and azeotroped with heptane (4×100 mL) to the crude which was purified by a silica gel plug (210 g silica gel, 100% heptane (1 L), then 25% ethyl acetate in heptane (2 L), followed by 100% ethyl acetate (2 L)) to afford the tide compound as white solid (21.2 g, 98%). ¹H NMR (400 MHz, CDCl₃) δ ppm 5.65 (d, 1H), 5.41-5.39 (m, 2H), 5.09 (dd, 1H), 4.34 (t, 1H), 3.93 (d, 1H), 3.75 (d, 1H), 3.65 (d, 1H), 3.50 (d, 1H), 3.45 (td, 1H), 3.38 (td, 1H), 2.21 (t, 2H), 2.17 (s, 3H), 2.00 (s, 3H), 1.98 (s, 3H, 1.64-1.52 (m, 4H), 1.44 (s, 9H). LCMS (m/z) for C₂₂H₃₅NNaO₁₀+(M+Na)⁺496.1; retention time=0.85 min (UPLC 1.5 min method).

[1844] Step 5: 5-{[(1 S,2R,3R,4R,5S)-4-(acetylamino)-2,3-bis(acetyloxy)-6,8-dioxabicyclo[3.2.1]oct-1-yl]methoxy}pentanoic acid. To a solution of tert-butyl 5-{[(1 S,2R,3R,4R,5S) 4-(acetylamino)-2,3-bis(acetyloxy)-6,8-dioxabicyclo[3.2.1]oct-1-yl]methoxy}pentanoate (21.1 g, 44.6 mmol) in dichloromethane (110 mL) placed in an ice bath was added hydrochloric acid (11 g, 0.31 mol, 78 mL, 4.0 M in 1,4-dioxane). The cooling bath was removed and the reaction was stirred at ambient temperature under nitrogen for 4 h. The reaction mixture was concentrated, and azeotroped with diethyl ether (200 mL), ethyl acetate (200 mL), and heptane (3×200 mL), and finally dried by vacuum overnight to afford the title compound as a white solid (18.6 g, quantitative). ¹H NMR (400 MHz, CD₃CN) S ppm 8.84 (br.s., 1H), 6.50 (d, 1H), 5.35 (d, 1H), 5.30 (d, 1H), 5.00 (dd, 1H), 4.17-4.07 (m, 1H), 3.93 (d, 1H), 3.78-3.56 (m, 2H), 3.52 (d, 1H), 3.49-3.34 (m, 2H), 2.26 (t, 2H), 2.12 (s, 3H), 1.92 (s, 3H), 1.85 (s, 3H), 1.60-1.47 (m, 4H). LCMS (m/z) for C₁₈H₂₈NO₁₀⁺ (M+H)⁺ 418.0; retention time=0.60 min (UPLC 1.5 min method).

[1845] Step 6: Benzyl 1-[(1S,2R,3R,4R,5S)-4-(acetylamino)-2,3-bis(acetyloxy)-6,8-dioxabicyclo[3.2.1]oct-1-yl]-18,18-bis{17-[(0.1 S,2R,3R,4R,5S)-4-(acetylamino)-2,3-bis(acetyloxy)-6,8-dioxabicyclo[3.2.1]oct-1-yl]-5,11-dioxo-2,16-dioxa-6,10-diazaheptadec-1-yl}-7,13,20-trioxo-2,16-dioxa-8,12,19-triazahentriacontan-31-oate. To a solution of 5-{[(1S,2R,3R,4R,5S)₄-(acetylamino) 2,3-bis(acetyloxy)-6,8-dioxabicyclo[3.2.1]oct-1-yl]methoxy}pentanoic acid (1.53 g, 3.63 mmol) in acetonitrile (6 mL) was added 1,1′-carbonyldiimidazole (0.580 g, 3.56 mmol) and the reaction mixture was stirred at room temperature. After 3 h, benzyl 12-((1,19-diamino-10-((3-((3-aminopropyl)amino)-3-oxopropoxy)methyl)-5,15-dioxo-8,12-dioxa-4,16-diazanonadecan-10-yl)amino)-12-oxododecanoate tris-trifluoroacetate salt (1.58 g, 1.03 mmol, 75.4 wt %) was added to the reaction mixture as a solution in acetonitrile (6 mL) followed by N,N-diisopropylethylamine (0.540 g, 4.14 mmol). The reaction mixture was stirred at room temperature overnight. The reaction mixture was concentrated, diluted by dichloromethane (70 mL), washed by hydrochloric acid (1 N, 30 mL), brine (30 mL), and saturated sodium bicarbonate (30 mL). The organic phase was dried over sodium sulfate, filtered, and concentrated. The resultant residue was purified by a silica gel plug (20 g silica gel, eluted with dichloromethane (100 mL), 10% methanol in dichloromethane (200 mL), followed by 25% methanol in dichloromethane (200 mL)) to afford the title compound as a white glass (2.25 g, quantitative yield). ¹H NMR (600 MHz, CD₃OD) δ ppm S 7.73-7.30 (m, 5H), 5.44 (d, 3H), 5.32 (s, 3H), 5.12-5.09 (m, 5H), 4.1.8 (d, 3H), 4.00 (d, 3H), 3.71 (dd, 6H), 3.68-3.67 (m, 12H), 3.51-3.45 (m, 6H), 3.41-3.38 (m, 3H), 3.21 (q, 12H), 2.42 (t, 6H), 2.35 (t, 2H), 2.22-2.17 (m, 6H), 2.16 (s, 9H), 1.94 (s, 18H), L72-1.58 (m, 16H), 1.58-1.42 (m, 8H), 1.38-1.29 (m. 12H). LCMS (m/z) for C₉₅H₁₅₀N₁₀O₃₆²⁺ (M+2H)²⁺ 1004.7; retention time=0.86 min (UPLC 3 min method)

[1846] Step 7: Example 31. A mixture of benzyl 1-[(1S,2R,3R,4R,5S)-4-(acetylamino)_{2,3}-bis(acetyloxy)-6,8-dioxabicyclo[3.2.1]oct-1-yl]-18,18-bis{17-[(1S,2R,3R,4R,5S)-4-(acetylamino)-2,3-bis(acetyloxy)-6,8-dioxabicyclo[3.2.1]oct-1-yl]-5,11-dioxo-2,16-dioxa-6,10-diazaheptadec-1-yl}-7,13,20-trioxo-2,16-dioxa-8,12,19-triazahentriacontan-31-oate (2.36 g, 1.18 mmol) and 10% palladium on carbon (0.376 mg) in methanol (14 mL) was stirred under hydrogen pressure (50 psi) at 25° C. in a stirred Parr reactor for 4.5 h. The reaction mixture was filtered through celite to remove the catalyst. The celite was washed with methanol (20 mL) and the combined filtrates were concentrated and azeotroped with methyl tert-butyl ether (3×20 mL). The crude was triturated in methyl ten-butyl ether (20 mL) overnight. The resulting white solid was collected by filtration, dried in vacuo to afford the title compound as a white solid (2.14 g, 95%). ¹H NMR (600 MHz, CD₃OD) δ ppm 5.45 (d, 3H), 5.32 (s, 3H), 5.11 (dd, 3H), 4.18 (d, 3H), 4.01 (d, 3H), 3.72 (dd, 6H), 3.70-3.64 (m, 12H), 3.52-3.47 (m, 6H), 3.42-3.39 (m, 3H), 3.22 (q, 12H), 2.42 (t, 6H), 2.28 (t, 2H), 2.19 (t, 6H) 2.16 (s, 9H) 1.95 (s, 18H) 1.73-1.50 (m. 24H) 1.38-1.29 (m, 12H). LCMS (m/z) for C₈₈H₁₄₃N₁₀O₃₆⁺1916.2 (M+H)⁺; retention time=1.35 min (UPLC 3 min method).

### 1-[(1 S,2R,3R,4R,5S)-4-(acetylamino) 2,3-bis(acetyloxy)-6,8-dioxabicyclo[3.2.1]oct-1-yl]-1.8-{1.7-[(1 S,2R,3R,4R,5S)-4-(acetylamino)-2,3-bis(acetyloxy)-6,8-dioxabicyclo[3.2.1]oct-1-yl]-5,11-dioxo-2,16-dioxa-6,10-diazaheptadec-1-yl}-7,13,20-trioxo-2,16-dioxa-8,12,19-triazahentriacontan-31-oic acid

[chemical structure]

[chemical structure]

[chemical structure]

[1848] Step 1: di-tert-Butyl 3,3′-[(2-aminopropane-1,3-diyl)bis(oxy)]dipropanoate. 1,1-Dimethylethyl 2-propenoate (1.44 kg, 11.3 mol) was added to a stirred suspension of 2-amino-1,3-propanediol (500 g, 5.49 mol) in dimethylsulfoxide (1.5 L) dropwise over. 1 hour at −5° C. The reaction mixture was then allowed to warm to 25° C. and stirring at that temperature continued until TLC analysis showed consumption of the starting material (16 h). The reaction mixture was diluted with water (3 L) and the mixture was extracted with ethyl acetate (5 L×1, 2.5 L×2). The combined organic layers were dried over sodium sulfate, filtered and concentrated in vacuo to afford a residue (1.30 kg). The crude was purified by column chromatography (5% ethyl acetate in petroleum ether then 10% methanol in dichloromethane) to afford the title compound as yellow oil (600 g, 31%). ¹H NMR (400 MHz, CDCl₃) δ ppm 3.69-3.60 (m, 4H), 3.45-3.37 (m. 2H), 3.29 (dd, 2H), 3.18-3.00 (m, 1H), 2.44 (t, 4H), 1.42 (s, 18H).

[1849] Step 2: Methyl 12-oxo-12-[(2,2,16,16-tetramethyl-4,14-dioxo-3,7,11,15-tetraoxaheptadecan-9-yl)amino]dodecanoate. This reaction was carried out 2 batches in parallel. 1,12-Dodecanedioic acid monomethyl ester (128 g, 0.524 mmol), hydroxybenzotriazole (70.7 g, 0.524 mmol), diisopropylethylamine (271 g, 2.10 mol) and 1-(3-dimethylaminopropyl)-3-ethylcarbodiimide hydrochloride (201 g, 1.05 mol) were added in to a stirred solution of di-tort-Butyl 3,3′-[(2-aminopropane-1,3-diyl)bis(oxy)]dipropanoate (182 g, 0.524 mol) in dichloromethane (1.6 L) at 20° C. and the reaction was stirred at room temperature until TLC analysis showed consumption of starting material (12 h). The two batches of this reaction mixture were combined, diluted with water (2 L) and stirred at room temperature for 10 minutes. The organic layer was separated and dried over sodium sulfate, filtered and concentrated. The resultant crude residue was purified by silica gel chromatography (20-50% ethyl acetate in petroleum ether) to afford the title compound as a light yellow oil (500 g, 83%). ¹H NMR (400 MHz, CDCl₃) δ ppm 6.21 (d, 1H), 4.14-4.03 (m, 1H), 3.68-3.54 (m, 7H), 3.49 (dd, 2H), 3.32 (dd, 2H), 2.49-2.30 (m, 4H), 2.21 (t, 2H), 2.10 (t, 2H), 1.53 (br.s., 4H), 1.37 (s, 18H), 1.09-1.27 (m, 12H)

[1850] Step 3: 3,3′-[{2-[(12-Methoxy-12-oxododecanoyl)amino]propane-1,3-diyl}bis(oxy)]dipropanoic acid. A solution of methyl 12-oxo-12-[(2,2,16,16-tetramethyl-4,14-dioxo-3,7,11,15-tetraoxaheptadecan-9-yl)amino]dodecanoate (546 g. 0.950 mol) in formic acid (2.5 L) was stint at 30-35° C. until TLC analysis showed consumption of starting material (18 h). The mixture was concentrated to afford a crude residue which was triturated in petroleum ether/ethyl acetate (10:1, 1.5 L) at 20° C. for 12 h. The resultant slurry was filtrated and the filter cake was dried in vacuo to afford the tide compound as a white solid (370 g, 84%). ¹H NMR (400 MHz, CDCl₃) δ ppm 10.02 (br.s., 2H), 6.33 1H), 4.27-4.16 (m, 1H), 3.73 (t, 4H), 3.66 (s, 3H), 3.59 (dd, 2H), 3.45 (dd, 2H), 2.59 (t, 4H), 2.30 (t, 2H), 2.20 (t, 2H), 1.66-1.53 (m. 4H), 1.26 (br.s., 12H).

[1851] Step 4: Methyl 15-(13,13-dimethyl-5,11-dioxo-2,12-dioxa-6,10-diazatetradec-1-yl)-22-dimethyl-4,10,17-trioxo-3,13 dioxa-5,9,16-triazaoctacosan-28-oate. 1-(3-Dimethylaminopropyl)-3-ethylcarbodiimide hydrochloride (348 g, 1.82 mol), hydroxybenzotriazole (205 g, 1.52 mol), and diisopropylethylamine (470 g, 3.64 mol) were added to a stirred solution of 3,3′-[{2-[(12-methoxy-12-oxododecanoyl)amino]propane-1,3-diyl}bis(oxy)]dipropanoicacid (280 g, 0.606 mmol) in DCM/DMF (2 L/250 mL) at 0-5° C. tort-Butyl (3-aminopropyl)carbamate (243 g, 1.39 mol) was then added to the reaction mixture at 0-5° C. in 4 portions over 20 min. The reaction was than allowed to warm to 25° C. and stirring was continued at that temperature until TLC analysis showed consumption of the starting material (12 h). The reaction mixture was concentrated and the resultant residue diluted with water (2 L). Then the mixture was extracted with ethyl acetate (2 L×1, 700 mL×2) and the combined organic layers were dried over sodium sulfate, filtered and concentrated. The resultant residue was purified by silica gel chromatography (100% ethyl acetate followed by 10% methanol in dichloromethane) to afford a white solid which was triturated in petroleum ether/ethyl acetate (1:2, 1 L) at 15° C. After 1.6 h the slurry was filleted and the filter cake was washed with ethyl acetate (200 mL) and subsequently dried in vacuo. The resultant solid was once again was triturated in petroleum ether/ethyl acetate (1:3, 600 mL) at 15° C. for 24 h. The slurry was filtered and the filter cake was washed with ethyl acetate (200 mL). The cake was dried in vacuo to obtain the title compound as a white solid (190 g, 40%). ¹H NMR (400 MHz, (CD₃)₂S0) S ppm 7.81 (t, 2H), 7.63 (d, 1H), 6.76 (t, 2H), 4.01-3.85 (m, 1H), 3.64-3.48 (m, 7H), 3.41-3.22 (m, 4H), 3.02 (q, 4H); 2.90 (q, 4H), 2.28 (t, 6H), 2.05 (t, 2H), 1.57-1.43 (m, 8H), 1.37 (s, 18H), 1.22 (br.s., 12H).

[1852] Step 5: 15-(13,13-dimethyl-5,11-dioxo-2,12-dioxa-6,10-diazatetradec-1-yl)-2,2-dimethyl-4,10,17-trioxo-3,13-dioxa-5,9,16-triazaoctacosan-28-oic acid. A solution of lithium hydroxide monohydrate (35.7 g, 853 mmol) in water (400 mL) was added to a stirred solution of methyl 15-(13,13-dimethyl-5,11-dioxo-2,12-dioxa-6,10-diazatetradec-1-yl)-22-dimethyl-4,10,17-trioxo-3,13-dioxa 5,9,16-triazaoctacosan-28-oate (220 g, 284 mmol) in tetrahydrofuran (1.2 L) at 20° C. The reaction mixture was then heated to 28° C. until TLC analysis showed consumption of starting material (18 h). The reaction mixture was concentrated and the resultant residue was diluted with water (2 L). The mixture was then washed with dichloromethane (1 L×2) and was acidified with aqueous hydrochloric acid (1 N, 900 mL) to pH<4. The mixture was extracted with dichloromethane (1 L×2) and the combined organic layers were dried over sodium sulfate, filtered and concentrated to afford the title compound as a light yellow gum (190 g, 88%). ¹H NMR (400 MHz, (CD₃)₂S0) 8 ppm 11.97 (br.s., 1H), 7.81 (t, 2H), 7.62 (d, 1H), 6.75 (t, 2H), 3.98-3.87 (m, 1H), 3.56 (t, 4H), 3.38-3.24 (m, 4H), 3.02 (q, 4H), 2.90 (q, 4H), 2.28 (t, 4H), 2.18 (t, 2H). 2.05 (t, 2H), 1.57-1.41 (m, 8H), 1.37 (s, 18H), 1.23 (br.s., 12H).

[1853] Step 6: Benzyl 15-(13,13-dimethyl-5,11-dioxo-2,12-dioxa-6,10-diazatetradec-1-yl) 22-dimethyl-4,10,17-trioxo-3,13-dioxa-5,9,16-triazaoctacosan-28-oate. Potassium carbonate (107 g, 773 mmol) and benzyl bromide (52.9 g, 309 mmol) were added to a stirred solution of 15-(13,13-dimethyl-5,11-dioxo-2,12-dioxa-6,10-diazatetradec-1-yl)-2,2-dimethyl-4,10,17-trioxo-3,13-dioxa-5,9,16-triazaoctacosan-28-oic acid (196 g, 258 mmol) in N,N-dimethylformamide (800 mL) at 20° C. The reaction mixture was then heated to 35° C. until TLC analysis showed consumption of starting material (12 h). The mixture was diluted with water (1.5 L) and extracted with methyl tert-butyl ether (1 L×1, 500 mL×2). The combined organic layers were washed with 5% aqueous lithium chloride (800 mL×2), dried over sodium sulfate, filtered and concentrated. The resultant residue was first purified by silica gel chromatography (10% methanol in dichloromethane) and subsequently by preparative HPLC (prepL-LD, Phenomenex Luna C18 250*80 mm*10 um, 30-100% acetonitrile in water modified with 10 mM ammonium bicarbonate, 250 mL/min) to afford the title compound as a white solid (100 g, 46%). ¹H NMR (400 MHz, CDCl₃) δ ppm 7.41-7.28 (m, 5H), 6.86 (t, 2H), 6.61 (d, 1H), 5.21 (t, 2H), 5.11 (s, 2H), 4.26-4.14 (m, 1H), 3.81-3.72 (m, 2H), 3.72-3.63 (m, 2H), 3.58 (dd, 2H), 3.41 (dd, 2H), 3.36-3.24 (m, 4H), 3.16 (q, 4H), 2.52-2.38 (m, 4H), 2.35 (t, 2H), 2.19 (t, 2H), 1.68-1.55 (m, 8H). 1.43 (s, 18H), 1.34-1.20 (m, 12H).

[1854] Step 7: Benzyl 12-[(1,3-bis{3-[(3-aminopropyl)amino]-3-oxopropoxy}propan-2-yl)amino]-12-oxododecanoate. A stirred solution of benzyl 15-(13,13-dimethyl-5,11-dioxo-2,12-dioxa-6,10-diazatetradec-1-yl)-2,2-dimethyl-4,10,17-trioxo-3,13-dioxa 5,9,16-triazaoctacosan-28-oate (5.0 g, 5.9 mmol) in dichloromethane (35 mL), was cooled in an ice bath. Trifluoroacetic acid (8.8 mL, 0.12 mol) was added drop-wise over 15 minutes. After an additional 15 minutes, the ice bath was removed and the reaction stirred at ambient temperature for 2 hours. The reaction was concentrated and acetonitrile (20 mL) was added. The solution was concentrated and dried on high vacuum pump overnight. The resulting oil was dissolved in dichloromethane (125 mL) and MP-Carbonate resin (Biotage) (18 g, 3.1 mmol/g) was added to free base the material. The mixture was stirred for 2.5 hours at ambient temperature under nitrogen. The resin was then filtered off and washed with dichloromethane (2.5 mL) followed by methanol (25 mL). The combined filtrates were concentrated and dried in vacuo overnight to afford the title compound as a white solid (4.1 g, quantitative). ¹H NMR (400 MHz. CD₃OD) S ppm 7.40-7.28 (m, 5H), 5.11 (s, 2H), 4.17-4.06 (m, 1H), 3.70 (t, 4H), 3.46 (d, 4H), 3.30-3.28 (m, 4H, overlapping with methanol shift). 2.95 (t, 4H), 2.46 (t, 4H), 2.36 (t, 2H), 2.20 (t, 2H), 1.85 (m, 4H), 1.61 (d, 4H), 1.30 (br.s., 12H).

[1855] Step 8: Pentafluorophenyl 5-{[(1S,2R,3R,4R,5S)-4-(acetylamino)-2,3-bis(acetyloxy)-6,8-dioxabicyclo[3.2.1]oct-1-yl]methoxy}pentanoate. To a solution of ten-butyl 5-{[(1 S,2R,3R,4R,5S)-4-(acetylamino)-2,3-bis(acetyloxy)-6,8-dioxabicyclo[3.2.1]oct-1-yl]methoxy}pentanoate (0.990 g, 2.04 mmol) in dichloromethane (8 mL) placed in an ice bath was added trifluoroacetic acid (1.90 g, 170 mmol) and the reaction was stirred at ambient temperature under nitrogen overnight. Deprotection of ester was complete as confirmed by LCMS [(m/z) for C₁₈H₂₈NO₁₀⁺ (M+H)⁺ 418.0]. The reaction mixture was cooled to 0° C. and 2,6-lutidine (2.18 g, 20.5 mmol) followed by pentafluorophenyl trifluoroacetate (0.86 g, 3.06 mmol mL) were added sequentially via addition funnel and the reaction mixture was stirred at ambient temperature. After 3 h, the reaction was quenched by addition of hydrochloric acid (1 N, 150 mL) and extracted with dichloromethane (200 mL). The organic phase was washed with hydrochloric acid (1 N, 3×150 mL) and saturated sodium bicarbonate (150 mL), then subsequently dried over sodium sulfate, filtered, and concentrated. The crude residue was purified by silica gel chromatography (25-75% ethyl acetate in heptane) to afford the title compound as white solid (1.03 g, 87%). ¹H NMR (600 MHz, CD₃CN) 6 ppm 6.49 (d, 1H), 5.36 (d, 1H), 5.30 (s, 1H), 5.01 (dd, 1H), 4.10 (t, 1H), 3.94 (d, 1H), 3.69 (dd, 2H), 3.55-3.46 (m, 2H), 3.46-3.36 (m, 1H), 2.72 (t, 2H). 2.12 (s, 3H), 1.91 (s, 3H), 1.85 (s, 3H), 1.80-1.68 (m, 2H), 1.66-1.53 (m, 2H). LCMS (m/z) for C₂₄H₂₇F₅NO₁₀⁺ (M+H)⁺ 584.8; Retention time=0.94 min (UPLC 1.5 min method).

[1856] Step 9: Benzyl 1-[(1S,2R,3R,4R,5S)-4-(acetylamino)-2,3-bis(acetyloxy)-6,8-dioxabicyclo[3.2.1]oct-1-yl]-18-{17-[(1 S,2R,3R,4R,5S)-4-(acetylamino)-2,3-bis(acetyloxy)-6,8-dioxabicyclo[3.2.1]oct-1-yl]-5,11-dioxo-2,16-dioxa-6,10-diazaheptadec-1-yl}-7,13,20-trioxo-2,16-dioxa-8,12,19-triazahentriacontan-31-oate. To a suspension of benzyl 12-[(1,3-bis{3-[(3-aminopropyl)amino]-3-oxopropoxy}propan-2-yl)amino]-12-oxododecanoate (1.05 g, 1.31 mmol) in a mixture of acetonitrile (18 mL) and dimethylformamide (8 mL) was added N,N-diisopropylethylamine (1.83 ml, 10.5 mmol). The resultant mixture was then added to a solution of pentafluorophenyl 5-{[(1S,2R,3R,4R,5S)-4-(acetylamino)-2,3-bis(acetyloxy)-6,8-dioxabicyclo[3.2.1]oct-1-yl]methoxy}pentanoate (1.75 g, 3.00 mmol) in acetonitrile (5 mL) and the reaction was stirred under nitrogen at ambient temperature fort hours. The reaction was then diluted with 0.1 N hydrochloric acid (50 ml) and extracted with dichloromethane (2×125 mL). The combined dichloromethane extracts were dried over sodium sulfate, filtered and concentrated. The resultant residue was purified by column chromatography (20-100% ethyl acetate in heptane and then 0-30% methanol in dichloromethane) to afford the title compound as a white solid (1.71 g, 89%). ¹H NMR (600 MHz, CD₃OD) δ ppm 7.37-7.28 (m, 5H), 5.46 (d, 2H), 5.34 (s, 2H), 5.17-5.07 (m, 4H), 4.20 (d, 2H), 4.15-4.09 (m, 1H), 4.02 (d, 2H), 3.67-3.79 (m, 8H), 3.57-3.18 (m, 181-1, overlapping with methanol peak), 2.45 (t, 4H), 2.38 (t, 2H), 2.25-2.12 (m, 12H), 1.96 (s, 12H), 1.76-1.48 (m, 0.14H), 1.43-1.25 (m, 14H).

[1857] Step 10: Example 32. A solution of benzyl 1-[(1S,2R,3R,4R,5S)-4-(acetylamino) 2,3-bis(acetyloxy)-6,8-dioxabicyclo[3.2.1]oct-1-yl]-18-{17-[(1S,2R,3R,4R,5S)-4-(acetyl amino)-2,3-bis(acetyloxy)-6,8-dioxabicyclo[3.2.1]oct-1-yl]-5,11-dioxo-2,16-dioxa-6,10-diazaheptadec-1-yl}-7,13,20-trioxo-2,16-dioxa-8,12,19-triazahentriacontan-31-oate (1.71 g, 1.18 mmol) in methanol (24 mL) was passed through a small 10% Pd/Catcart on the H-cube under full H2 (20 bar) at 25° C. and 1 mL/min flow rate. The Catcart was rinsed with additional methanol (10 mL) and the flow through was concentrated to an oil. The residue was dissolved in dichloromethane and concentrated (2×25 mL) to afford a sticky white foam. The material was dried on vacuum pump overnight and subsequently dissolved in acetonitrile/water (3.8 mL, 1:1) and lyophilized to a white solid (1.52 g, 95%). ¹H NMR (400 MHz, CD₃OD) δ ppm 5.44 (d, 2H), 5.32 (s, 2H), 5.12-5.09 (m. 2H), 4.18 (d, 2H), 4.13-4.1.0 (m. 1. H) 4.01 (d, 2H) 3.79-3.67 (m, 8H), 3.56-3.35 (m, 10H), 3.26-3.14 (m, 8H), 2.43 (t, 4H), 2.28 (t, 2H), 2.23-2.14 (m, 12H) 1.97-1.92 (m, 12H), 1.74-1.50 (m, 14H), 1.41-1.28 (m. 14H). LCMS (m/z) for C₆₃H₁₀₄N₁O₂₅⁺ (M+H)⁺ 1359.1; retention time=0.80 min (UPLC 1.5 min run).

### 1-[(1S,2R,3R,4R,5S)-4-(acetylamino) 2,3-dihydroxy-6,8-dioxabicyclo[3.2.1]oct-1-yl]-18-{17-[(1 S,2R,3R,4R,5S)-4-(acetylamino)-2,3-dihydroxy-6,8-dioxabicyclo[3.2.1]oct-1-yl]-5,11-dioxo-2,16-dioxa-6,10-diazaheptadec-1-yl}-7,13,20-trioxo-2,16-dioxa-8,12,19-triazahentriacontan-31-oic acid

[chemical structure]

[chemical structure]

[chemical structure]

[1859] Step 1: 12-(Benzyloxy)-12-oxododecanoic acid. Dodecanedioic acid (15.0 g, 65.0 mmol) and Dowex-H-form (65 g) were added to a mixture of heptane (0.52 L), and benzyl formate (142 g, 1.04 mot, 130 mL) and the reaction was heated to reflux for 24 h. The reaction was then cooled and the resin filtered off. The filtrate was concentrated in vacuo and the resultant residue was purified by silica gel chromatography (0-20% ethyl acetate in heptane) to afford a slushy residue. The isolate was slurried overnight (5% ethyl acetate in heptane, 20 mL). The mixture was filtered by vacuum filtration and the resultant solid washed with heptane to afford the tile compound as a white solid (6.66 g, 39%). ¹H NMR (400 MHz, CDCl₃) δ ppm 7.36 (s, 5171), 5.12 (s, 2H), 2.42-2.30 (m, 4H), 1.75-1.54 (m, 4H), 1.45-1.16 (m. 12H).

[1860] Step 2: Benzyl 12-oxo-12-[(2,2,16,16-tetramethyl-4,14-dioxo-3,7,11,15-tetraoxaheptadecan-9-yl)amino]dodecanoate. n-Propylphosphonic acid anhydride, cyclic trimer (2.3 g, 3.6 mmol, 2.0 mL, 50% in ethyl acetate) was added to a suspension of 12-(benzyloxy)-12-oxododecanoic acid (0.95 g, 2.98 mmol), di-tert-butyl 3, 3′-[(2-aminopropane-1,3-diyl)bis(oxy)]dipropanoate (1.03 g, 2.98 mmol) and N,N-diisopropylethylamine (1.2 g, 8.9 mmol, 1.6 mL) in dimethylfomamide (8 mL) and the reaction mixture was stirred at room temperature overnight. The reaction mixture was diluted with ethyl acetate (100 mL) and washed with hydrochloric acid (1 N, 30 mL), saturated sodium bicarbonate (30 mL), and brine (30 mL). The organic phase was dried over sodium sulfate, filtered, and concentrated to afford a residue which was then azeotroped with heptane (3×40 mL) to afford the title compound as a solid (2.0 g, 100%). ¹H NMR (600 MHz. CD₃CN) 6 ppm 7.41-7.31 (m, 5H), 6.34 (d, 1H), 5.08 (s, 2H), 4.01 (td, 1H), 3.67-3.58 (m, 4H), 3.44 (dd, 2H), 3.36 (dd, 2H), 2.40 (t, 4H), 2.33 (t, 2H), 2.09 (t, 2H), 1.61-1.49 (m, 4H), 1.43 (s, 18H), 1.30-1.25 (m, 12H). LCMS (m/z) for. C₃₆H₆₀NO₉⁺ (M+H)⁺ 650.5; retention time=1.23 min (UPLC 1.5 min method)

[1861] Step 3: 3,3′-[(2-{[12-(benzyloxy)-12-oxododecanoyl]amino}propane-1,3-diyl)bis(oxy)]dipropanoic acid. A solution of 12-oxo-12-[(2,2,16,16-tetramethyl-4,14-dioxo 3,7,11,15-tetraoxaheptadecan-9-yl)amino]dodecanoate (1.60 g, 2.47 mmol) in trifluoracetic acid (15 g, 130 mmol, 10.0 mL) was stirred at ambient temperature overnight. The reaction mixture was concentrated and the resultant residue was azeotroped with diethyl ether (4×70 mL) at 20° C. and subsequently dried in vacuo overnight to afford the title compound as a gum (4.03 g, 99%, 2.11 equiv TFA). ¹H NMR (600 MHz, CD₃CN) 6 ppm 7.52-7.24 (m, 5H), 6.89 (d, 1H), 5.14-5.04 (m, 2H), 4.15-4.01 (m, 1H), 3.65 (1, 4H), 3.49-3.46 (m, 2H), 3.44-3.41 (m, 2H), 2.50 (t, 4H), 2.33 (t, 2H), 2.21 (t, 2H), 1.57 (td, 4H), 1.23-1.32 (m, 12H). LCMS (m/z) for C₂₈H₄₄NO₉⁺ (M+H)⁺ 538.6; retention time=0.92 min (UPLC 1.5 min method).

[1862] Step 4: Benzyl 12-({1,3-bis[3-oxo-3-(pentafluorophenoxy)propoxy]propan-2-yl}amino)-12-oxododecanoate. To a suspension of 3,3-[(2-{[12-(benzyloxy)-12-oxododecanoyl]amino}propane-1,3-diyl)bis(oxy)]dipropanoic acid (1.57 g, 2.41 mmol, 1 equiv TFA) di-isopropylethylamine (3.11 g, 24.1 mmol, 4.20 mL) in dimethylformamide (10 mL) pentafluorophenyl trifluoroacetate (5.40 g, 19.3 mmol, 3.31 mL) was added dropwise in an ice-bath. The resulting solution was stirred at ambient temperature. The reaction mixture was concentrated and azeotroped with heptane (2×20 mL). The resulting residue was diluted with ethyl acetate (80 mL), washed with 10% citric acid (30 mL), saturated sodium bicarbonate (30 mL), and brine (30 mL), dried over Na₂SO₄, and concentrated. The crude was purified by silica gel chromatography (0-60% ethyl acetate in heptane) to afford the title compound as a solid (983 mg, 47%). ¹H NMR (600 MHz, CD₃CN-d₃) δ ppm 7.44-7.24 (m, 5H), 6.23 (d, 1.1-1), 5.08 (s, 2H), 4.08 (td, 1H), 3.81-3.76 (m, 4H), 3.53-3.42 (m, 4H), 2.92 (t, 4H), 2.32 (t, 2H), 2.07 (t, 2H), 1.62-1.46 (m, 4H), 1.32-1.19 (m, 12H). LCMS (m/z) for C₄₀H₄₂NO₉⁺ (M+H)⁺ 870.6; retention time=1.23 min (UPLC 1.5 min method).

[1863] Step 5: 5-{[(1 S,2R,3R,4R,5S)-4-(Acetylamino)-2,3-dihydroxy-6,8-dioxabicyclo[3.2.1]oct-1-yl]methoxy}pentanoic acid. To a solution of tert-butyl 5-{[(1 S,2R,6R,7R,8S)-7-(acetylamino)-4,4-dimethyl-3,5,9,11-tetraoxatricyclo[6.2.1.0˜2,6˜]undec-1-yl]methoxy}pentanoate (2.09 g, 4.87 mmol) in dichloromethane (15 mL) and water (2 mL) was added trifluoroacetic acid (22 g 200 mmol, 15 mL) and the reaction mixture was stirred at ambient temperature overnight. The crude was concentrated, azeotroped with toluene (3×50 mL), then heptane (3×50 ml), and dried in vacuo to afford the title compound as a gum (2.08 g, quantitative, 0.83 equiv TFA). LCMS (m/z) for C₁₄H₂₄NO₈⁺ (M+H)⁺ 334.2; retention time=0.45 min (UPLC 1.5 min method)

[1864] Step 6: (1S,2R,3R,4R,5S)-4-(Acetylamino)-1-(3,9-dioxo-1-phenyl-2,14-dioxa-4,8-diazapentadecan-15-yl)-6,8-dioxabicyclo[3.2.1.]octane-2,3-diyl diacetate. To solution of 5-{[(1 S,2R,3R,4R,5S)-4-(acetylamino)-2,3-dihydroxy-6,8-dioxabicyclo[3.2.1]oct-1-yl]methoxy}pentanoic acid containing about 1 equiv TFA (1.0 g, 2.05 mmol) in dichloromethane (12 mL) and dimethylformamide (5 mL) was added di-isopropylethylamine (1.59 g, 12.3 mmol), o-(benzotriazol-1-yl)-N,N,N′,N′-tetramethyluronium hexafluorophosphate (0.93 g, 2.46 mmol) and 1H-benzotriazol-1-ol (277 mg, 2.05 mmol). The cloudy mixture was stirred at room temperature for 20 min. Benzyl n-(3-aminopropyl)carbamate hydrochloride (502 mg, 2 mmol) was then added. The resulting mixture was stirred at ambient temperature overnight. Formation of amide product was confirmed by LCMS [C₂₅H₃₈N₃O₉⁺, (M+H)⁺ 524.5]. The reaction mixture was concentrated to 5 mL and diluted with pyridine (6 mL). To this solution was added acetic anhydride (6.0 g, 60 mmol) and the reaction mixture was stirred at 50° C. overnight. The reaction mixture was cooled to room temperature, diluted with ethyl acetate (70 mL), washed with hydrochloric acid (1 N, 30 mL), saturated sodium bicarbonate (30 mL), and brine (30 mL). The separated organic phase was dried over sodium sulfate, filtered, and concentrated. The crude was purified by silica gel chromatography (0-15% methanol in dichloromethane) to afford the title compound as a glass (1.28 g, 100%). LCMS (m/z) for C₂₉H₄₂N₃O₁₁⁺, (M+H)⁺608.5; retention time=0.70 min (UPLC 1.5 min method)

[1865] Step 7: Benzyl {3-[(5-{[(1 S,2R,3R,4R,5S)-4-(acetylamino)-2,3-dihydroxy-6,8-dioxabicyclo[3.2.1]oct-1-yl]methoxy}pentanoyl)amino]propyl}carbamate. To a suspension (1 S,2R,3R,4R,5S)-4-(acetylamino)-1-(3,9-dioxo-1-phenyl-2,14-dioxa-4,8-diazapentadecan-15-yl)-6,8-dioxabicyclo[3.2.1]octane-2,3-diyl diacetate (1.5 g, 2.47 mmol) in methanol (8 mL) was added potassium hydroxide (1 M in methanol, 5.3 mL, 5.3 mmol). The reaction mixture was stirred at room temperature for 1 h. The reaction mixture was then treated with hydrochloric acid (4.0 M in dioxane, 1.5 mL) dropwise. The resulting slurry was concentrated and triturated in ethanol (15 mL) for 10 min. The resulting potassium chloride precipitate was removed by filtration, rinsed by ethanol (5 mL). The filtrate was concentrated, dried by vacuum to afford the entitled compound as a gum (1.28 g, 98%). ¹H NMR (600 MHz, METHANOL-d₄) S ppm 7.41-7.25 (m, 5H), 5.21 (5, 1H), 5.07 (s, 2H), 3.93 (dd, 2H), 3.86 (d, 1H), 3.77 (d, 1H), 3.71 (dd, 1H), 3.65 (d, 1H), 3.58 (d, 1H), 3.53-3.46 (m, 2H), 3.20 (t, 2H), 3.15 (t, 2H), 2.20 (t; 2H), 1.99 (s, 3H), 1.70-1.62 (m, 4H), 1.61-1.53 (m, 2H). LCMS (m/z) for C₂₅H₃₈N₃O₉⁺, (M+H)⁺524.5; retention time===0.64 min (UPLC 1.5 min method)

[1866] Step 8: 5-{[(1 S,2R,3R,4R,5S)-4-(Acetylamino)-2,3-dihydroxy-6,8-dioxabicyclo[3.2.1]oct-1-yl]methoxy}-N-(3-aminopropyl)pentanamide. A mixture of benzyl {3-[(5 {[(1S,2R,3R,4R,5S)-4-(acetylamino)-2,3-dihydroxy-6,8-dioxabicyclo[3.2.1]oct-1-yl]methoxy}pentanoyl)amino]propyl}carbamate (1.60 g, 2.4 mmol) and 10% palladium on carbon (200 mg) in methanol (20 mL) was stirred under hydrogen pressure (50 psi) at ambient temperature in a Parr reactor overnight. The reaction mixture was filtered through celite. The celite was washed with methanol (50 mL) and the combined filtrates were concentrated, and dried in vacuo to afford the title compound as a solid (925 mg, 97%). ¹H NMR (600 MHz, METHANOL-d₄) δ ppm 5.21 (s, 1H), 3.94 (d, 1H), 3.90 (d, 1H), 3.86 (d, 1H), 3.77 (d, 1H), 3.71. (dd, 1H), 3.6.5 (d, 1H), 3.61. (d, 1H), 3.58-3.46 (m, 2H), 3.26 (t, 2H), 2.82 (t, 2H), 2.22 (t, 2H), 1.99 (s, 3H), 1.76 (quin, 2H), 1.68 (quin, 2H), 1.63-1.56 (m, 2H). LCMS (m/z) for C₁₇H₃₂N₃O₇+, (M+H)⁺ 390.5; retention time=0.47 min(UPLC 1.5 min method)

[1867] Step 9: Benzyl 1-[(1 S,2R,3R,4R,5S)-4-(acetylamino)-2,3-dihydroxy-6,8-dioxabicyclo[3.2.1]oct-1-yl]-18-{17-[(1 S,2R,3R,4R,5S)-4-(acetylamino)-2,3-dihydroxy-6,8-dioxabicyclo[3.2.1]oct-1-yl]-5,11-dioxo-2,16-dioxa-6,10-diazaheptadec-1-yl}-7,13,20-trioxo-2,16-dioxa-8,12,19-triazahentriacontan-31-oate. A mixture of 5-{[(1 S,2R,3R,4R,5S)-4-(acetylamino)-2,3-dihydroxy-6,8-dioxabicyclo[3.2.1]oct-1-yl]methoxy}-N-(3-aminopropyl)pentanamide (607 mg, 1.40 mmol) and benzyl 12-({1,3-bis[3-oxo-3-(pentafluorophenoxy)propoxy]propan-2 yl}amino)-12-oxododecanoate (500 mg, 0.58 mmol), and N,N-diisopropylethylamine (200 mg, 2.0 mmol) in a mixture of dichloromethane (8 mL) and dimethylformamide (3 mL) was stirred at room temperature overnight. The reaction mixture was concentrated, azeotroped with heptane (3×10 mL), and concentrated. The crude residue was purified by silica gel chromatography (0-40% methanol in dichloromethane) to afford the title compound as a glass (520 mg, 71%). ¹H NMR (600 MHz, METHANOL-d₄) δ ppm 7.37-7.29 (m, 5H), 5.21 (s, 2H), 5.11 (s, 2H), 4.11 (t, 1H), 3.94 (dd, 4H), 3.87 (d, 2H), 3.77 (d, 2H), 3.75-3.67 (m, 6H), 3.64 (d, 2H), 3.57 (d, 2H), 3.55-3.42 (m, 8H). 3.23-3.19 (m, 8H), 2.43 (t, 4H). 2.36 (t, 2H), 2.20 (q, 6H), 1.98 (s, 6H), 1.72-1.54 (m. 16H), 1.35-1.28 (m, 12H). LCMS C₆₂H₁₀₂N₇O₂₁⁺, (M+H)⁺ 1280.3; retention time=1.45 min (UPLC 3 min method)

[1868] Step 1.0: Example 33. 1-[(1S,2R,3R,4R,5S)-4-(acetylamino)-2,3-dihydroxy-6,8-dioxabicyclo[3.2.1]oct-1-yl]-18,18-bis{17-[(1 S,2R,3R,4R,5S)-4-(acetylamino)-2,3-dihydroxy-6,8-dioxabicyclo[3.2.1]oct-1-yl]-5,11-dioxo-2,16-dioxa-6,10-diazaheptadec-1-yl}-7,13,20-trioxo-2,16-dioxa-8,12,19-triazahentriacontan-31-oic acid. A solution of benzyl 1-[(1 S,2R,3R,4R,5S)-4-(acetylamino) 2,3-dihydroxy-6,8-dioxabicyclo[3.2.1]oct-1-yl]-18-{17-[(1 S,2R,3R,4R,5S)-4-(acetylamino)-2,3-dihydroxy-6,8-dioxabicyclo[3.2.1]oct-1-yl]-5,11-dioxo-2,16-dioxa 6,10-diazaheptadec-1-yl}-7,13,20-trioxo-2,16-dioxa-8,12,19 triazahentriacontan-31-oate (520 mg, 0.41 mmol) in methanol (16 mL) was passed through 10% Pd/C 30×4 CatCart® on ThalesNano H-Cube Pro™ with a flow rate of 1 mL/min at 25° C. under full H₂. The system was rinsed by methanol (20 mL). The filtrate was concentrated, azeotroped with methylene chloride (20 mL), then heptane (20 mL). The resulting residue was dissolved in acetonitrile/water (1:1, 20 mL) and freeze dried to afford the title compound as a white solid (477 mg, 99%). ¹H NMR (600 MHz, METHANOL-d₄) δ ppm 5.21 (s, 2H), 4.11 (t, 1H), 3.98-3.87 (m, 4H), 3.87 (d, 2H), 3.78 (d, 2H), 3.74-3.67 (m, 6H), 3.6.5 (d, 2H), 3.58 (d, 2H), 3.55-3.45 (m, 8H), 3.21 (q, 8H), 2.43 (t, 4H), 2.27 (t, 2H), 2.23-2.16 (m, 6H), 1.99 (s, 6H), 1.72-1.62 (m, 8H), 1.63-1.54 (m, 8H), 1.35-1.28 (m, 12H). LCMS (m/z) for C₅₅H₉₆N₇O₂₁⁺, (M+H)⁺1190.7; retention time=1.07 min (UPLC 3 min method).

### 1-[(1S,2R,3R,4R,5S)-4-(acetylamino) 2,3-dihydroxy-6,8-dioxabicyclo[3.2.1]oct-1-yl]-7,13,20-trioxo-2,16-dioxa-8,12,19-triazahentriacontan-31-oic acid

[chemical structure]

[chemical structure]

[1870] Step 1: Benzyl 12-{[2-(3-tert-butoxy-3-oxopropoxy)ethyl]amino}-12-oxododecanoate. 12-benzyloxy-12-oxododecanoic acid (2.33 g, 7.26 mmol), tert-butyl 3-(2-aminoethoxy)propanoate (1.25 g, 6.60 mmol) and N,N-diisopropylethylamine (2.3 ml, 13 mmol) were dissolved in N,N-dimethylfomamide (35 mL). To this solution was added N,N,N′,N′-tetramethyl-O-(1H-benzotriazol-1-yl)uronium hexafluorophosphate, O-(Benzotriazol-1-yl)-N,N,N′,N′-tetramethyluronium hexafluorophosphate (2.75 g, 7.26 mmol) and the reaction stirred at ambient temperature for 16 h. The reaction was concentrated and the residue was dissolved in ethyl acetate (100 mL) and washed sequentially with saturated sodium bicarbonate, water, and brine (25 mL each). The organic layer was then dried over sodium sulfate, filtered and concentrated to a colorless oil. The residue was purified by silica gel chromatography (0-100% ethyl acetate in heptane) to afford the desired product as a white solid (2.58 g, 80%). ¹H NMR (400 MHz, CDCl₃) δ ppm 7.41-7.30 (m, 5H), 6.18 (br.s., 1H), 5.12 (s, 2H), 3.69 (t, 2H), 3.57-3.51 (m, 2H), 3.49-3.42 (m, 210, 2.49 (t, 2H), 2.36 (t, 2H), 2.23-2.14 (m, 2H), 1.63 (d, 4H), 1.47 (s, 9H), 1.36-1.22 (m, 12H).

[1871] Step 2: 3-(2-{[12-(Benzyloxy)-12-oxododecanoyl]amino}ethoxy)propanoic acid. Benzyl 12-{[2-(3-tert-butoxy-3-oxopropoxy)ethyl]amino}-12-oxododecanoate (2.58 g, 5.25 mmol) was dissolved in dichloromethane (12 mL). To this was added trifluoroacetic acid (20 ml, 0.27 mol). After 2 h stirring at ambient temperature, the reaction was concentrated. The resultant residue was dissolved in toluene and concentrated (2×20 mL) and subsequently dried on vacuum pump to afford a solid (2.21 g). ¹H NMR (400 MHz, CDCl₃) δ ppm 7.41-7.30 (m, 5H) 6.08 (br.s., 1H) 5.12 (s, 2H) 3.74 (t, 2H) 3.61-3.51 (m, 2H) 3.50-3.40 (m, 2H) 2.64 (t, 2H) 2.36 (t, 2H) 2.25-2.11 (m, 21-1) 1.72-1.54 (m, 41-1) 1.27 (m, 1.2H).

[1872] Step 3: Benzyl 12-oxo-12-({2-[3-oxo-3-(pentafluorophenoxy)propoxy]ethyl}amino)dodecanoate. N,N-diisopropylethylamine (3.52 ml, 20.2 mmol) was added to a solution of 3-(2-{[12-(benzyloxy)-12-oxododecanoyl]amino}ethoxy)propanoic acid (2.20 g, 5.05 mmol) in dimethylformamide (24 mL). To this was then added pentafluorophenol-2,2,2-trifluoroacetate (1.74 mL, 10.1 mmol) in a slow stream. The reaction turned purple in color and was stirred at ambient temperature for 18 h. The reaction mixture was concentrated to 1/3 volume on a rotary evaporator (50° C., high vacuum pump) and the resultant concentrate was diluted with ethyl acetate (300 mL), washed with 10% citric acid (100 mL), saturated sodium bicarbonate (100 mL) and brine (100 mL). The organic layer was dried over sodiumsulfate, filtered, and concentrated. The residue was purified by silica gel chromatography (0-100% ethyl acetate in heptane) to afford the desired product as a yellow solid (2.46 g, 78% over 2 steps). ¹H NMR (400 MHz, CDCl₃) δ ppm 7.41-7.30 (m, 5H), 5.85 (br.s., 1H) 5.12 (s, 2H), 3.85 (t, 2H), 3.64-3.54 (m, 2H), 3.52-3.43 (m, 2H), 2.94 (t, 2H), 2.36 (t, 2H), 2.16 (t, 2H), 1.70-1.60 (m, 41-1), 1.26 (m, 12H).

[1873] Step 4: Benzyl 1-[(1S,2R,3R,4R,5S)-4-(acetylamino)-2,3-dihydroxy-6,8-dioxabicyclo[3.2.1]oct-1-yl]-20-oxo-2,16-dioxa-8,12,19-triazahentriacontan-31-oate. A mixture of 5 {[(1 S,2R,3R,4R,5S)-4-(acetylamino)-2,3-dihydroxy-6,8-dioxabicyclo[3.2.1]oct-1-yl]methoxy}-N-(3-aminopropyl)pentanamide (172 mg, 0.440 mmol) and benzyl 12-oxo-12-({2-[3-oxo-3-(pentafluorophenoxy)propoxy]ethyl}amino)dodecanoate (220 mg, 0.402 mmol), N,N-diisopropylethylamine (95 mg, 0.73 mmol) in a mixture of dichloromethane (3.3 mL) and dimethylformamide (0.7 mL) was stirred at room temperature overnight. The reaction mixture was concentrated, azeotroped with heptane (3×10 mL), and concentrated. The crude was purified by silica gel chromatography (0-25% methanol in dichloromethane to afford the title compound as an oil (185 mg 57%). ¹H NMR (600 MHz, METHANOL-d₄) δ ppm 7.39-7.28 (m, 5H), 5.21 (s, 1H), 5.11 (s, 2H), 3.99-3.89 (m, 2H), 3.87 (d, 1H), 3.77 (d, 1H), 3.75-3.67 (m, 3H), 3.64 (d, 1H), 3.57 (d, 1H), 3.55-3.44 (m, 4H), 3.38-3.32 (m, 2H), 3.26-3.16 (m, 4H), 2.44 (t, 2H), 2.36 (t, 2H), 2.19 (td, 4H), 1.99 (s, 3H), 1.70-1.55 (m, 10H), 1.33-1.25 (m. 12H). LCMS (m/z) for C₄₁H, N₄O₁₂⁺, (M+H)⁺ 807.8; retention time=1.60 min(UPLC 3 min method).

[1874] Step 5: Example 34. A solution of benzyl 1-[(1S,2R,3R,4R,5S)-4-(acetylamino) 2,3-dihydroxy-6,8-dioxabicyclo[3.2.1]oct-1-yl]-20-oxo-2,16-dioxa-8,12,19-triazahtriacontan-31-oate (0.22 g, 0.25 mmol) in methanol (22 mL) was passed through 10% Pd/C 30×4 CatCart® ThalesNano H-cube Pro™ with a flow rate of 1 mL/min at 25° C. under full H₂. The system was rinsed by methanol (40 mL). The filtrate was concentrated, azeotroped with methylene chloride (20 mL), then heptane (20 mL). The resulting residue was dissolved in acetonitrile/water (1:1, 20 mL) and freeze dried to afford the title compound as a white solid (177 mg, 99%). ¹H NMR (600 MHz, METHANOL-d₄) δ ppm 5.20 (s, 1H), 4.01-3.89 (m, 2H). 3.87 (d, 1H), 3.77 (d, 1H), 3.75-3.68 (m, 3H), 3.65 (d, 1H), 3.57 (d, 1H), 3.55-3.45 (m, 4H), 3.34 (t, 2H), 3.27-3.14 (m, 4H), 2.44 (t, 2H), 2.28 (t, 2H), 2.20 (td, 4H), 1.98 (s, 3H), 1.67 (t, 4H), 1.63-1.54 (m, 6H), 1.35-1.28 (m, 12H). C₃₄H₆₁N₄O₁₂⁺, (M+H)⁺717.7; retention time=1.12 min (UPCL 3 min method).

### 5,11,18-trioxo-16-{[3-oxo-3-({3-[(5-{[3,4,6-tri-O-acetyl-2-(acetylamino)-2-deoxy-β-D-galactopyranosyl]oxy}pentanoyl)amino]propyl}amino)propoxy]methyl}-1-{[3,4,6-tri-O-acetyl-2-(acetylamino)-2-deoxy-β-D-galactopyranosyl]oxy}-14-oxa-6,10,17-triazanonacosan-29-oic acid

[chemical structure]

[chemical structure]

[1876] Step 1: Benzyl {3-[(5-{[3,4,6-tri-O-acetyl-2-(acetylamino)-2-deoxy-β-D-galactopyranosyl]oxy}pentanoyl)amino]propyl}carbamate. N,N-diisopropylethylamine (1.38 mL, 7.95 mmol) was added to a solution of benzyl (3-aminopropyl)carbamate hydrochloride salt (0.713 g, 2.01 mmol) in N,N-dimethylformamide (3.5 mL). The resultant mixture was then added to a solution of 5-(((2R,3R,4R,5R,6R)-3-acetamido-4,5-diacetoxy-6-(acetoxymethyl)tetrahydro-2H-pyran-2-yl)oxy)pentanoic acid (1.19 g, 2.65 mmol) in dimethylformamide (10 mL). 1-[Bis(dimethylamino)methylene]-1H-1,2,3-triazolo[4,5-b]pyridinium 3-oxid hexafluorophosphate (1.11 g, 2.91 mmol) was then added and the reaction mixture was stirred at ambient temperature under an atmosphere of nitrogen (2.5 h). The reaction was quenched with saturated ammonium chloride (50 mL) and extracted with dichloromethane (4×75 mL). The combined organic layers were washed with brine (50 mL), dried over sodium sulfate, filtered and concentrated. The resultant oil was purified by silica gel chromatography (2-6% methanol in dichloromethane) to afford the desired product as a white foam (0.904 g, 53%). ¹H NMR (400 MHz, CD₃OD) δ ppm 7.41-7.25 (m, 5H), 5.33 (d, 1H), 5.12-5.02 (m, 3H), 4.54 (d, 1H), 4.19-4.03 (m, 3H), 4.03-3.97 (m, 1H), 3.91-3.82 (m, 1H), 3.60-3.46 (m, 2H), 3.11-3.25 (m, 4H), 2.16-2.23 (m, 2H), 2.13 (s, 3H), 2.02 (s, 3H), 1.95 (s, 3H), 1.92 (s, 3H), 1.73-1.53 (m, 6H), 1.40-1.34 (m, 2H).

[1877] Step 2: N-(3-aminopropyl)-5-{[3,4,6-tri-O-acetyl-2-(acetylamino)-2-deoxy-β-D-galactopyranosyl]oxy}pentanamide acetate salt. Benzyl {3-[(5-{[3,4,6-tri-O-acetyl-2-(acetylamino)-2-deoxy-β-D-galactopyranosyl]oxy}pentanoyl)amino]propyl}carbamate 5-{[3,4,6-tri-O-acetyl-2-(acetylamino)-2-deoxy-β-D-galactopyranosyl]oxy}pentanoic acid (1.01 g, 1.59 mmol) was dissolved in a mixture of methanol (30 mL) and glacial acetic acid (91 uL, 1.6 mmol). To this was added 10% Pd/C (0.2 g, wet) under nitrogen and the reaction mixture was placed in a sealed, stirred Parr reactor under 50 psi hydrogen. After. 16 h the head space was purged with nitrogen (×4) and filtered through a 0.45 um nylon syringe filter. The filter was washed with methanol and the combined filtrates were concentrated to afford the title compound as a white foam (0.86 g mg, 96%). ¹H NMR (400 MHz, CD₃OD) δ ppm 5.34 (d, 1H), 5.06-5.02 (m, 1H), 4.52 (d, 1H), 4.19-4.05 (m, 3H), 4.04-3.98 (m, 1H), 3.92-3.84 (m, 1H), 3.56-3.47 (m, 1H), 2.98-2.89 (m, 2H), 2.23 (t, 2H), 2.14 (s, 3H), 2.06 (d, 1H), 2.03 (s, 3H), 1.94 (d, 5H), 1.91 (s, 3H), 1.83 (m, 2H), 1.74-1.54 (m, 4H), 1.39-1.31 (m, 1H).

[1878] Step 3: Benzyl 5,11,18-trioxo-16-{[3-oxo-3-({3-[(5-{[3,4,6-tri-O-acetyl-2-(acetylamino)-2-deoxy-β-D-galactopyranosyl]oxy}pentanoyl)amino]propyl}amino)propoxy]methyl}-1-{[3,4,6-tri-O-acetyl-2-(acetylamino)-2-deoxy-β-D-galactopyranosyl]oxy}-14-oxa-6,10,17-triazanonacosan-29-oate. Benzyl 12-({1,3-bis[3-oxo-3-(pentafluorophenoxy)propoxy]propan-2-yl}amino)-12-oxododecanoate (150 mg, 0.172 mmol), N-(3-aminopropyl)-5-{[3,4,6-tri-O-acetyl-2-(acetylamino)-2-deoxy-β-D-galactopyranosyl]oxy}pentanamide acetate salt (233 mg, 0.414 mmol) and N,N-diisopropylethylamine (0.15 ml, 0.862 mmol) were dissolved in dichloromethane (3.5 mL) and stirred at ambient temperature for 64 h. The reaction mixture was concentrated and heptane was added and the residue concentrated once again (×3). The resultant residue was purified by silica gel chromatography (4-14% methanol in dichloromethane) to afford the desired product as a colorless glass (175 mg, 67%). The compound was then dissolved in a mixture of acetonitrile and water (1:1, 30 mL) and freeze dried to afford a white solid.

[1879] ¹H NMR (400 MHz. CDCl₃) δ ppm 7.42-7.37 (m, 5H), 7.15 (br.s., 2H) 6.94-6.84 (m. 3H), 6.51-6.45 (m, 2H), 5.38 (d, 2H), 5.20 (d, 2H), 5.14 (s, 2H), 4.65-4.57 (m, 2H), 4.27-4.06 (m, 8H), 4.02-3.90 (m, 4H), 3.73 (br. s., 6H), 3.63-3.42 (m, 8H), 3.37-3.26 (m, 8H), 2.47 (br.s., 5H), 2.38 (t, 3H). 2.34-2.15 (m, 15H), 2.12 (s, 6H), 2.03 (s, 6H), 1.98 (s, 6H), 1.78 (br.s., 4H) 1.28 (d, 14H).

[1880] Step 4: Example 35. 10% Pd/C (30 mg, wet) was added to a solution of Benzyl-5,11,18-trioxo-1.6-{[3-oxo-3-({3-[(5-{[3,4,6-tri-O-acetyl-2-(acetylamino)-2-deoxy-β-D-galactopyranosyl]oxy}pentanoyl)amino]propyl}amino)propoxy]methyl}-1-{[3,4,6-tri-O-acetyl-2-(acetylamino)-2-deoxy-β-D-galactopyranosyl]oxy}-14-oxa-6,10,17-triazanonacosan-29-oate (282 mg 0.187 mmol) in methanol (5 mL). The mixture was placed in the HelCat under 50 psi hydrogen and stirred at ambient temperature for 16 h. The head space was then purged with nitrogen (×3) and the solution was filtered through a 0.2 um nylon syringe filter. The filter was washed with methanol and the combined filtrates were concentrated to afford the title compound as a white foam which was then dissolved in a mixture of acetonitrile and water (1:1, 20 mL) and freeze dried to a white solid (262 mg 99%). ¹H NMR (400 MHz, CD₃OD) δ ppm 5.33 (d, 2H), 5.08-5.04 (m, 2H), 4.55 (d, 2H) 4.21-3.98 (m, 10H), 3.91-3.83 (m, 2H), 3.69 (t, 4H) 3.60-3.44 (m, 8H), 3.24-3.19 (m, 8H), 2.43 (t, 4H), 2.31-2.16 (m, 8H), 2.14 (s, 6H). 2.06-2.00 (m. 6H), 1.94 (d, 1014), 1.73-1.55 (m, 15H), 1.40-1.28 (m, 12H). LCMS (m/z) for C₆₅H₁₀₈N₇O₂; (M+H)⁺ 1419.7; retention time=1.34 min (UPLC 3.0 min run)

### 5,11,18-trioxo-1-{[3,4,6-tri-O-acetyl-2-(acetylamino)-2-deoxy-β-D-galactopyranosyl]oxy}-14-oxa-6,10,17-triazanonacosan-29-oic acid

[chemical structure]

[chemical structure]

[1882] Step 1: Benzyl 5,11,18-trioxo-1-{[3,4,6-tin-O-acetyl-2-(acetylimino)-2-deoxy-β-D-galactopyranosyl]oxy}-14-oxa-6,10,17-triazanonacosan-29-oate. N-(3- aminopropyl)-5-{[3,4,6-tri-O-acetyl-2-(acetylamino)-2-deoxy-β-D-galactopyranosyl]oxy}pentanamide acetate salt (159 mg, 0.264 mmol) was added to a solution of benzyl 12-oxo-12-({2-[3-oxo-3-(pentafluorophenoxy)propoxy]ethyl}amino)dodecanoate (164 mg, 0.291 mmol) and N,N-diisopropylethylamine (200 uL, 1.32 mmol) in dichloromethane (5 mL) and the reaction was stirred at ambient temperature for 16 h. The reaction mixture was concentrated and the resultant residue was taken up in heptane and concentrated (3×10 ml). The resultant residue was purified by silica gel chromatography (0-10% methanol in dichloromethane) to afford the title compound as colorless glass (116 mg, 48%). LCMS (m/z) for C₄₈H₇₂N₄O₁₅⁺ (M+H)⁺921.8; retention time=0.91 min (UPLC 1.3 min run).

[1883] Step 2: Example 36. 10% Pd/C (25 mg, wet) was added under nitrogen to a solution of benzyl 5,11,18-trioxo-1-{[3,4,6-tri-O-acetyl-2-(acetylamino)-2-deoxy-β-D-galactopyranosyl]oxy}-14-oxa-6,10,17-triazanonacosan-29-oate (196 mg, 0.213 mmol) in methanol (5 mL). The reaction was placed in the HelCat under 50 psi hydrogen and stirred at ambient temperature for 16 h. The head space was purged with nitrogen (×3) and the solution was filtered through a 0.2 urn nylon syringe filter. The filter was washed with methanol and the combined filtrates were concentrated to afford the title compound as a colorless glass which was then dissolved in a mixture of acetonitrile and water (1:1, 20 mL) and freeze dried to afford a white solid (165 mg, 93%). ¹H NMR (400 MHz, CD₃OD) δ ppm 8.01-7.91 (m, 1H), 5.33 (d, 1H), 5.06 (m, 1H), 4.55 (d, 1H), 4.19-3.98 (m, 4H), 3.91-3.84 (m, 1H), 3.76-3.67 (m, 2H), 3.57-3.47 (m, 4H), 3.25-3.18 (m, 4H), 2.44 (t, 2H), 2.30-2.16 (m, 6H), 2.14 (s, 3H), 2.02 (s, 3H), 1.95 (s, 3H). 1.93 (s, 3H), 1.73-1.54 (m, 10H), 1.39-1.28 (m, 12H). LCMS (m/z) for C₃₉H₆₁N₄O₁₁+(M+H)⁺831.8; retention time=1.30 min (UPLC 3.0 min run.

### Example 37. Synthesis of oligonucleotides

[1884] Synthesis of various oligonucleotides is described herein. The two digits following the decimal after the WV oligonucleotide designation indicate a batch number. For example, WV-7107.03 indicates batch 03 of WV-7107.

### Example 37A. Synthesis of WV-7107 and WV-6558

[1885] WV-6558 which has the sequence 5′-Mod001 L001 Aeo*SGeom5CeoTeoTeo*RC*ST*ST*SG*RT*SC*SC*RA*SG*SC*RTeoTeoTeoAeo*S Teo-3′ (SEQ ID NO: 1136) is a GalNAc conjugate of WV-7107 which has the sequence 5′-L001 Aeo*SGeom5CeoTeoTeo*RC*ST*ST*SG*RT*SC*SC*RA*SG*SC*RTeoTeoTeoAeo*STeo-3′. (SEQ ID NO: 1142). The GalNAc conjugation step is performed on WV-7107 to make WV-6558.

[1886] Solid Phase Synthesis of WV-7107:

Synthesis of WV-7107 was performed on an ÄKTA OP100 synthesizer (GE healthcare) using a 6.0 cm diameter stainless steel column reactor on a 3300 μmol scale using CPG support (Loading 72 umol/g). The process consists of five steps; detritylation, coupling, capping 1, oxidation/thiolation and capping 2. Detritylation was performed using 3% DCA in toluene with a UV watch command set at 436 nm. Following detritylation, at least 4 column volumes (CV) of ACN was used to wash of the detritylation reagent.
All phosphoramidite and activator solutions (CMIMT and ETT) were prepared and dried over 3A molecular sieves for at least 4 hours prior to synthesis.

[1887] Stereo-defined amidite coupling was performed using 0.2 M amidite solutions and 0.6 M CMIMT. All amidites were dissolved in ACN except dC-L and dC-D amidites which were dissolved in isobutyronitrile (IBN). Stereo-defined MOE amidites were dissolved in 20% IBN/ACN v/v. CMIMT was dissolved in ACN. Using 4 equivalents, coupling was performed by mixing 40% (by volume) of the respective amidite solution with 67% of the CMIMT activator in-line prior to addition to the column. The coupling mixture was then recirculated fora minimum of 10 minutes to maximize the coupling efficiency.

Standard stereorandom amidite coupling was performed using 0.2 M amidite solutions and 0.6 M ETT in ACN. MOE-T amidite was dissolved 20% IBN/ACN v/v. Using 4 equivalents, coupling was performed by mixing 40% (by volume) of the respective amidite solution with 60% of the ETT activator in-line prior to addition to the column. The coupling mixture was then recirculated for a minimum of 6 minutes to maximize the coupling efficiency.
After coupling in both instances, the column was washed with 2CV of ACN.
For stereo-defined couplings, the column was then treated with Capping 1 solution (Acetic Anhydride, Lutidine, ACN) mixture for 1 CV to in 4 minutes acetylate the Chiral axillary amine. Following this step the column was washed with ACN for at least 2 CV. Thiolation was then performed with 0.2 M Xanthane Hydride in pyridine with a contact time of 6 min for 2 CV. After a 2 CV thiolation wash step using ACN, capping 2 was performed using 0.5 CV of Capping A and Capping B reagents mixed inline (1:1) followed by a 2CV ACN wash.
For stereorandom coupling cycles, there is no Capping 1 step. Oxidation was performed using 50 mM Iodine in/PyridinetH2O (9:1) for 2.5 min and 3.5 equivalents. After a 2CV ACN wash, capping 2 was performed using 0.5 CV of Capping A and Capping B reagents mixed inline (1:1) followed by a 2 CV ACN wash.

[1888] Cleavage and Deprotection of WV-7107:

67% (or 2200 μmot) of the material synthesized above was used in this step. The DPSE protecting groups on WV-7107 were removed by treating the oligo bound solid support with a 1M solution of TEA.HF made by mixing DMSO. Water, TEA and TEA.3HF in a v/v ratio of 39:8:1:2.5, to make a 100 mL solution per mmol of oligo. The mixture was then shaken at 25′ C for 6 hours in an incubator shaker. The mixture was cooled (ice bath) then 200 mL of aqueous ammonia per mmol of oligo added. The mixture was then shaken at 45° C. for 16 hours. The mixture was then filtered (0.2-1.2 μm filters) and the cake rinsed with water. The filtrate liquor was obtained and analyzed by UPLC and a purity of 30.8% FLP obtained. Quantitation was done using a Nano Drop one spectrophotometer (Thermo Scientific) and a yield of about 101,200 OD/mmol obtained.

[1889] Purification and Desalting of WV-7107:

The crude WV-7107 loaded on to an Agilent Load & Lock column (5 cm×32 cm) packed with Source 15Q (GE healthcare). Purification was performed on an ÄKTA 150 Pure (GE Healthcare) using 20 mM NaOH and 2.5 M NaCl as eluents. Fractions were analyzed and pooled to obtain material with a purity ≥70%. The purified material was then desalted on 2K re-generated cellulose membranes followed by lyophilization to obtain WV-7107 as a white powder. This material was then used for conjugation experiments.

### Example 37B. Synthesis of WV-6558

### Protocol for GalNAc Conjugation

[1890] Precursor material: WV-7107.03
Final Conjugated product: WV-6558.03

### Reagents for Conjugation

TABLE 2
Aqueous Oligonucleotide Solution

| Oligonucleotide/ | | Equivalent to | | | |
|---|---|---|---|---|---|
| Reagents | MW | Oligonucleotide | mg | μL | μmole |
| WV-7107.03 | 7191.7 | 1 | 400 | — | 55.62 |
| Tri-antennary | 2005 | 1.6 | 178.4 | — | 88.99 |
| GalNAc | | | | | |
| Lot: GL-N12-26 | | | | | |
| HATU | 382 | 1.4 | 29.75 | — | 77.87 |
| P/N Sigma 445460 | | | | | |
| Lot: MKBV8272V | | | | | |
| DIEA | 129 | 10.0 | — | 98.83 | 556.2 |
| P/N Sigma 387649 | | | | | |
| Lot: SHBG2052V | | | | | |
| Acetonitrile | — | — | — | 4000 | — |

| | Conc | Total volume | Total |
|---|---|---|---|
| Oligonucleotide/Solvent | (mg/mL) | (mL) | mg |
| WV-7107.01 in water | 50 | 8 | 400 |

[1892] Weighed 1-(((2R,3R,4R,5R,6R)-3-acetamido-4,5-diacetoxy-6-(acetoxymethyl)tetrahydro-2F1-pyran 2-yl)oxy)-16,16-bis((3-((3-(5-(((2R,3R,4R,5R,6R)-3-acetamido-4,5-diacetoxy-6-(acetoxy methyl)tetrahydro-2H-pyran-2-yl)oxy)pentanamido)propyl)amino)-3-oxopropoxy)methyl)-5,11,18-trioxo-14-oxa-6,10,17-triazanonacosan-29-oic acid (0.1.6 eq), and HATU (1.4 eq.) and transferred to a 50 ml plastic tube. Dissolved the material in anhydrous acetonitrile then add DIEA (d=0.742) (10 eq) into the tube. The clear mixture was stirred for 20 min at 37° C. Reconstituted the lyophilized WV-7107 sample with 8 mL water to a concentration at 50 mg/mL. Then the GalNac mixture was added to sample WV-7107 and stirred for 60 min at 37° C. The progress of the reaction was monitored by UPLC. The reaction is complete after 1 h of incubation. The solution was concentrated under vacuum (by speed vac) to remove acetonitrile and the resultant GalNAc-conjugated oligo was treated with concentrated Ammonium hydroxide (5 mL) for deprotection by incubating for 1 h at 37° C. The formation of the final product WV-6558 was confirmed by UPLC and Mass Spectrometry. The conjugated samples were purified by anion exchange chromatography. Observed Mass: 8802.4 (Deconvoluted), Target Mass: 8801.6.

### Example 37C. Synthesis of WV-9542

[1893] Protocol for PFE Conjugation

[1894] Precursor material: WV-7107.02

[1895] Final Conjugated product: WV-9542.01

[1896] Reagents for Conjugation

TABLE 2
Aqueous Oligonucleotide Solution

| Oligonucleotide/ | | Equivalent to | | | |
|---|---|---|---|---|---|
| Reagents | MW | Oligonucleotide | mg | μL | μmole |
| WV-7107.02 | 7191.7 | 1 | 1700 | — | 236.38 |
| Tri-antennary PFE | 2065.8 | 1.6 | 781.3 | — | 378.21 |
| ASGPR ligand | | | | | |
| Lot: GL-N12-58 | | | | | |
| HATU | 382 | 1.2 | 108.36 | — | 283.66 |
| P/N Sigma 445460 | | | | | |
| Lot: MKBV8272V | | | | | |
| DIEA | 129 | 10.0 | 304.93 | 420.02 | 2363.84 |
| P/N Sigma 387649 | | | | | |
| Lot: SHBG2052V | | | | | |
| DMF | — | — | — | 13000 | — |

| | Conc | Total volume | Total |
|---|---|---|---|
| Oligonucleotide/Solvent | (mg/mL) | (mL) | mg |
| WV-7107.01 in water | 60 | 13 | 1800 |

[1897] Weighed Tri-antennary PFE ASGPR ligand (18,18-bis(17-((1S,2R,3R,4R,5S)₄-acetamido-2,3-dihydroxy-6,8-dioxabicyclo[3.2.1]octan-1-yl)-5,11-dioxo-2,16-dioxa-6,10-diazaheptadecyl)-1-((1 S2R,3R,4R,5S)-4-acetamido-2,3-dihydroxy-6,8-dioxabicyclo[3.2.1]octan-1-yl)-7,13,20-trioxo-2,16-dioxa-8,12,19-triazahentriacontan-3l-oic acid) (1.6 eq), and HATU (1.2 eq.) and transferred to a 50 mL tube. Dissolved the material in anhydrous Dimethylformamide then add DIEA (d0.742) (10 eq) into the tube. The solution was sonicated till it became clear, and it was stirred for 20 min at 37° C. Reconstituted WV-7107 sample with 13 mL water. Then the Tri-antennary PFE ligand mixture was added to sample WV-7107 and stirred for 1 hr at 37° C. The progress of the reaction was monitored by UPLC. The reaction was incomplete after 1 hr incubation. Second addition of Tri-antennary PFE ligand (1.2 eq) and HATU (1 eq) were weighed out and dissolved in 5 mL DMF with DIEA (15 eq), incubated the ligand for 20 min at 37° C. for activation. Then added the activated ligand to the reaction mixture and incubated for 1 hr at 37° C. The reaction completed and the formation of the final product WV-9542 was confirmed by UPLC and Mass Spectrometry. The conjugated samples were purified by anion exchange chromatography. Observed Mass: 8837.6 (Deconvoluted), Target Mass: 8837.6.

### Example 37D. Synthesis of WV-9543

### Protocol for PFE Conjugation

[1898] Precursor material: WV-7107.02
Final Conjugated product: WV-9543.01

### Reagents for Conjugation

TABLE 2
Aqueous Oligonucleotide Solution

| Oligonucleotide/ | | Equivalent to | | | |
|---|---|---|---|---|---|
| Reagents | MW | Oligonucleotide | mg | μL | μmole |
| WV-7107.02 | 7191.7 | 1 | 90 | — | 12.51 |
| Bis-antennary | 1418.59 | 2 | 35.5 | — | 25.03 |
| GalNAc | | | | | |
| Lot: PF-07075575 | | | | | |
| HATU | 382 | 1.8 | 8.6 | — | 22.53 |
| P/N Sigma 445460 | | | | | |
| Lot: MKBV8272V | | | | | |
| DIEA | 129 | 10.0 | 16.14 | 22.24 | 125.14 |
| P/N Sigma 387649 | | | | | |
| Lot: SHBG2052V | | | | | |
| Dimethylformamide | — | — | — | 1500 | — |

| | Conc | Total volume | Total |
|---|---|---|---|
| Oligonucleotide/Solvent | (mg/mL) | (mL) | mg |
| WV-7107.01 in water | 60 | 1.5 | 90 |

[1900] Weighed the Bis-antennary GalNAc (1-(((2R,3R,4R,5R,6R)-3-acetamido-4,5-diacetoxy-6-(acetoxymethyl)tetrahydro-2H-pyran-2-yl)oxy)-16-((3-((3-(5-(((2R,3R,4R,5R,6R)-3-acetamido-4,5-diacetoxy-6-(acetoxy methyl)tetrahydro-2H-pyran-2-yl)oxy)pentanamido)propyl)amino)-3-oxopropoxy)methyl)-5,11,18-trioxo-14-oxa-6,10,17-triazanonacosan-29-oic acid) (2.0 eq), and HATU (1.8 eq) and transferred to a 50 mL tube. Dissolved the material in anhydrous Dimethylformamide (1.5 mL) then add DIEA (d=0.742) (10 eq) into the tube. The solution was sonicated till it became clear, and it was stirred for 20 min at 37° C. Reconstituted WV-7107 sample with 1.5 mL water. Then the Bis-antennary GalNAc mixture was added to sample WV-7107 and stirred for 1 hr at 37° C. The progress of the reaction was monitored by UPLC. The reaction was completed after 1 hr incubation. The mixture was treated with concentrated Ammonium hydroxide (2 mL) for deprotection by incubating for 0.1 h at 37° C. Formation of the final product WV-9543 was confirmed by UPLC and Mass Spectrometry. The conjugated samples were purified by anion exchange chromatography. Observed Mass: 8342.6 (Deconvoluted), Target Mass: 8340.1.

### Example 37E. Synthesis of WV-9544

### Protocol for PFE Conjugation

[1901] Precursor material: WV-7107.02
Final Conjugated product: WV-954401

### Reagents for Conjugation

TABLE 2
Aqueous Oligonucleotide Solution

| Oligonucleotide/ | | Equivalent to | | | |
|---|---|---|---|---|---|
| Reagents | MW | Oligonucleotide | mg | μL | μmole |
| WV-7107.02 | 7191.7 | 1 | 90 | — | 12.51 |
| Bis-antennary | 1190.39 | 2 | 29.8 | — | 25.03 |
| PFE ASGPR ligand | | | | | |
| Lot: PF-07075667 | | | | | |
| HATU | 382 | 1.8 | 8.6 | — | 22.53 |
| P/N Sigma 445460 | | | | | |
| Lot: MKBV8272V | | | | | |
| DIEA | 129 | 10.0 | 16.14 | 22.24 | 125.14 |
| P/N Sigma 387649 | | | | | |
| Lot: SHBG2052V | | | | | |
| Dimethylformamide | — | — | — | 1500 | — |

| | Conc | Total volume | Total |
|---|---|---|---|
| Oligonucleotide/Solvent | (mg/mL) | (mL) | mg |
| WV-7107.01 in water | 60 | 1.5 | 90 |

[1903] Weighed the Bis-antennary PFE ASGPR ligand (18-(17-((1S,2R,3R,4R,5S)-4-acetamido-2,3-dihydroxy-6,8-dioxabicyclo[3.2.1]octan-1-yl)-5,11-dioxo-2,16-dioxa-6,10-diazaheptadecyl)-1-((1 S,2R,3R,4R,5S)-4-acetamido-2,3-dihydroxy-6,8-di oxabicyclo[3.2.1]octan-1-yl)-7,13,20-trioxo-2,16-dioxa-8,12,19-triazahentriacontan-31-oic acid)(2.0 eq), and HATU (1.8 eq) and transferred to a 50 mL tube. Dissolved the material in anhydrous Dimethylfomamide (1.5 mL) then add DIEA (d=0.742) (10 eq) into the tube. The solution was sonicated till it became clear, and it was stirred for 20 min at 37° C. Reconstituted WV-7107 sample with 1.5 mL water. Then the Bis-antennary PFE ASGPR ligand mixture was added to sample WV-7107 and stirred for. 1 hr at 37° C. The progress of the reaction was monitored by UPLC. The reaction was completed after 1 hr incubation. Formation of the final product WV-9544 was confirmed by UPLC and Mass Spectrometry. The conjugated samples were purified by anion exchange chromatography. Observed Mass: 8367.2 (Deconvoluted), Target Mass: 8364.1.

### Example 37F. Synthesis of WV-9545

### Protocol for PFE Conjugation

[1904] Precursor material: WV-7107.02
Final Conjugated product: WV-9545.01

### Reagents for Conjugation

TABLE 2
Aqueous Oligonucleotide Solution

| Oligonucleotide/ | | Equivalent to | | | |
|---|---|---|---|---|---|
| Reagents | MW | Oligonucleotide | mg | μL | μmole |
| WV-7107.02 | 7191.7 | 1 | 90 | — | 12.51 |
| Mono GalNAc | 830.97 | 2 | 20.8 | — | 25.03 |
| Lot: PF-07075574 | | | | | |
| HATU | 382 | 1.8 | 8.6 | — | 22.53 |
| P/N Sigma 445460 | | | | | |
| Lot: MKBV8272V | | | | | |
| DIEA | 129 | 10.0 | 16.14 | 22.24 | 125.14 |
| P/N Sigma 387649 | | | | | |
| Lot: SHBG2052V | | | | | |
| Dimethylformamide | — | — | — | 1500 | — |

| | Conc | Total volume | Total |
|---|---|---|---|
| Oligonucleotide/Solvent | (mg/mL) | (mL) | mg |
| WV-7107.01 in water | 60 | 1.5 | 90 |

[1906] Weighed the Mono GalNAc (1-(((2R,3R,4R,5R,6R)-3-acetamido-4,5-diacetoxy-6-(acetoxymethyl)tetrahydro-2H-pyran 2-yl)oxy)-5,11,18-trioxo-14-oxa-6,10,17-triazanonacosan-29-oic acid) (2.0 eq), and HATU (1.8 eq) and transferred to a 50 mL tube. Dissolved the material in anhydrous Dimethylformamide (1.5 mL) then add DIEA (d=0.742) (10 eq) into the tube. The solution was sonicated till it became clear, and it was stirred for 20 min at 37° C. Reconstituted WV-7107 sample with 1.5 mL water. Then the Mono GalNAc ligand mixture was added to sample WV-7107 and stirred for 1 hr at 37° C. The progress of the reaction was monitored by UPLC. The reaction was completed after 1 hr incubation. The mixture was treated with concentrated Ammonium hydroxide (2 mL) for deprotection by incubating for 1 h at 37° C. Formation of the final product WV-9545 was confirmed by UPLC and Mass Spectrometry. The conjugated samples were purified by anion exchange chromatography. Observed Mass: 7881.3 (Deconvoluted), Target Mass: 7878.6.

### Example 37G. Synthesis of WV-9546

### Protocol for PFE Conjugation

[1907] Precursor material: WV-7107.02
Final Conjugated product: WV-9546.01

### Reagents for Conjugation

TABLE 2
Aqueous Oligonucleotide Solution

| Oligonucleotide/ | | Equivalent to | | | |
|---|---|---|---|---|---|
| Reagents | MW | Oligonucleotide | mg | μL | μmole |
| WV-7107.02 | 7191.7 | 1 | 90 | — | 12.51 |
| Mono PFE ASGPR | 716.87 | 2 | 17.9 | — | 25.03 |
| ligand | | | | | |
| Lot: PF-07075666 | | | | | |
| HATU | 382 | 1.8 | 8.6 | — | 22.53 |
| P/N Sigma 445460 | | | | | |
| Lot: MKBV8272V | | | | | |
| DIEA | 129 | 10.0 | 16.14 | 22.24 | 125.14 |
| P/N Sigma 387649 | | | | | |
| Lot: SHBG2052V | | | | | |
| Dimethylformamide | — | — | — | 1500 | — |

| | Conc | Total volume | Total |
|---|---|---|---|
| Oligonucleotide/Solvent | (mg/mL) | (mL) | mg |
| WV-7107.01 in water | 60 | 1.5 | 90 |

[1909] Weighed the Mono PFE ASGPR ligand (1-((1. S,2R,3R,4R,5S)-4-acetamido 2,3-dihydroxy-6,8-dioxabicyclo[3.2.1]octan-1-yl)-7,13,20-trioxo-2,16-dioxa-8,12,19-triazahentriacontan-31-oic acid) (2.0 eq), and HATU (1.8 eq) and transferred to a 50 mL tube. Dissolved the material in anhydrous Dimethylformamide (1.5 mL) then add DIEA (d=0.742) (10 eq) into the tube. The solution was sonicated till it became clear, and it was stirred for 20 min at 37° C. Reconstituted WV-7107 sample with 1.5 mL water. Then the Mono GalNAc ligand mixture was added to sample WV-7107 and stirred for 1 hr at 37° C. The progress of the reaction was monitored by UPLC. The reaction was completed after 1 hr incubation. Formation of the final product WV-9546 was confirmed by UPLC and Mass Spectrometry. The conjugated samples were purified by anion exchange chromatography. Observed Mass: 7893.1 (Deconvoluted), Target Mass: 7890.6.

### Example 37H. EX Purification Condition

[1910] For sample WV-9542

| Buffer A | 20 mM Sodium Hydroxide | |
|---|---|---|
| Buffer B | 2.5 N sodium chloride in 20 mM Sodium | |
| | hydroxide | |
| Column | 2.5 cm × 33 cm Source 15Q | |
| Gradient | % B | Column Vol (160 mL) |
| | 0 | 2 |
| | 0-15 | 2 |
| | 15 | 1 |
| | 15-90 | 15 |
| | 100 | 1 |

| Buffer A | 20 mM Sodium Hydroxide | |
|---|---|---|
| Buffer B | 2.5 N sodium chloride in 20 mM Sodium | |
| | hydroxide | |
| Column | 2.0 cm × 10 cm Source 15Q | |
| Gradient | % B | Column Vol (160 mL) |
| | 0 | 2 |
| | 0-20 | 5 |
| | 20 | 1 |
| | 20-90 | 15 |
| | 100 | 1 |

### Example 38. Synthesis of Ligand

### Synthesis of 1-(((2R,3R,4R,5R,6R)-3-acetamido-4,5-diacetoxy-6-(acetoxymethyl)tetrahydro-2H-pyran-2-yl)oxy)-16,16-bis((3-((3-(5-(((2R,3R,4R,5R,6R)-3-acetamido-4,5-diacetoxy-6-(acetoxymethyl)tetrahydro-2H-pyran 2-yl)oxy)pentanamido)propyl)amino)-3-oxopropoxy)methyl)-5,11,18-trioxo-14-oxa-6,10,17-triazanonacosan-29-oic acid

[chemical structure]

[chemical structure]

[chemical structure]

[chemical structure]

[1912] Step 1: To a solution of di-tert-butyl 3,3′-((2-amino-2-((3-(tert-butoxy)-3-oxopropoxy methyl)propane-1,3-diyl)bis(oxy))dipropanoate (5.0 g. 9.89 mmol) and 12-methoxy-12-oxododecanoic acid (2.416 g, 9.89 mmol) in DMF (45 mL) was added HATU (3.76 g, 9.89 mmol) and DIPEA (2.58 ml, 14.83 mmol). The reaction mixture was stirred at room temperature for 5 hrs. Solvent was concentrated under reduced pressure, and diluted with brine, extracted with EtOAc, dried over anhydrous sodium sulfate, and concentrated to give a residue, which was purified by ISCO (120 g gold silica gel cartridge) eluting with 10% EtOAc in hexane to 40% EtOAc in hexane to (Ave di-tert-butyl 3,3T ((2-((3-(tert-butoxy)-3-oxopropoxy)methyl)-2-(12-methoxy-12-oxododecamido)propane-1,3-diyl)bis(oxy))dipropanoate (5.13 g, 7.01 mmol, 70.9% yield) as a colorless oil. ¹H NMR (400 MHz, Chloroform-d) δ 6.03 (s, 1H), 3.74-3.61 (in, 15H), 2.45 (t, J=6.3 Hz, 6H), 2.31 (td, J=7.5, 3.9 Hz, 2H), 2 19-2.10 (m, 2H), 1.64-1.59 (m, 4H), 1.46 (s, 27H), 1.32-1.24 (in, 12H); MS (ESI), 732.6 (M+H)⁺.

[1913] Step 2: A solution of di-tert-butyl 3,3′-((2-((3-(tert-butoxy)-3-oxopropoxy)methyl)-2-(12-methoxy-12-oxododecanamido)propane-1,3-diyl)bis(oxy))dipropanoate (5.0 g, 6.83 mmol) in formic acid (50 mL) was stirred at room temperature for 48 hrs. Solvent was evaporated under reduced pressure, co-evaporated with toluene (3×) to give a white solid, which was dried under high vacuum for 2 days. LC-MS and H NMR showed the reaction is not complete. The crude product was redissolved in formic acid (50 mL). The reaction mixture was stirred at room temperature for 24 his. LC-MS showed the reaction was complete. Solvent was evaporated under reduced pressure, co-evaporated with toluene (3×), dried over high vacuum to give 3,3′-((2-((2-carboxyethoxy)methyl)-2-(12-methoxy-12-oxododecanamido)propane-1,3-diyl)bis(oxy))dipropanoic acid (4.00 g) as a white solid. MS (EST): 562.4 (M−H)⁻.

[1914] Step 3: A solution of 3,3′-((2-((2-carboxyethoxy)methyl)-2-(12-methoxy-12-oxododecanamido)propane-1,3-diyl)bis(oxy))dipropanoicacid (3.85 g, 6.83 mmol) and HOBt (3.88 g, 28.7 mmol) in DCM (60 mL) and DMF (15 mL) at 0° C. was added tert-butyl (3-aminopmpyl)carbamate (4.76 g, 27.3 mmol). EDAC ITC salt (5.24 g, 27.3 mmol) and DIPEA (8.33 ml, 47.8 mmol). The reaction mixture was stirred at 0° C. for 15 minutes and at room temperature for 20 hrs. LC-MS showed the reaction was not complete. t-Butyl (3-aminopropyl) carbamate (1.59 g, 9.12 mmol) and EDC HCl salt (1.75 g, 9.13 mol) was added into the reaction mixture. The reaction mixture was continually stirred at room temperature for 4 hrs. Solvent was evaporated to give a residue, which was dissolved in EtOAc (300 mL), washed with water. (1×), saturated sodium bicarbonate (2×), 10% citric acid (2×) and water, dried over sodium sulfate, and concentrated to give a residue which was purified by ISCO (80 g gold cartridge) eluting with DCM to 30% MeOH in DCM to give methyl 15,15-bis(13,13-dimethyl-5,11-dioxo-2,12-dioxa-6,10-diazatetradecyl)-2,2-dimethyl-4,10,17-trioxo-3,13-dioxa-5,9,16-triazaoctacosan-28-oate (6.61 g, 6.40 mmol, 94% yield over 2 steps) as a white solid. MS (EST): 1033.5 (M+H)⁺.

[1915] Step 4: To a solution of methyl 15,15-bis(13,13-dimethyl-5,11-dioxo-2,12-dioxa-6,10-diazatetradecyl)-2,2-dimethyl-4,10,17-trioxo-3,13-dioxa-5,9,16-triazaoctacosan-28-oate (6.56 g, 6.35 mmol) in THE (75 mL) was added aq. LiOH (0.457 g, 19.06 mmol) in water (25 mL). The mixture was stirred at room temperature for overnight. LC-MS showed the reaction was completed. Solvent was evaporated, acidified using 1 N HCl (4.5 mL), extracted with DCM (3×), dried over anhydrous sodium sulfate, concentrated to give 15,15-bis(13,13-dimethyl-5,11-dioxo-2,12-dioxa-6,10-ditetradecyl) 2,2-dimethyl-4,10,17-trioxo-3,13-dioxa-5,9,16-triazaoctacosan-28 is acid (6.31 g, 6.20 mmol, 98% yield) as a white solid. MS (ESI): 1019.6 (M+Hr.

[1916] Step 5: To a solution of 15,15-bis(13,13-dimethyl-5,11-dioxo-2,12-dioxa-6,10-diazatetradecyl)-2,2-dimethyl-4,10,17-trioxo-3,13-dioxa-5,9,16-triazaoctacosan-28-oic acid (6.31 g, 6.20 mmol) and (bromomethyl)benzene (1.272 g, 7.44 mmol) in DMF (40 mL) was added K₂CO₃ (2.57 g, 18.59 mmol). The mixture was stirred at 40° C. for 4 hrs and at room temperature for overnight. Solvent was evaporated under reduced pressure. The reaction mixture was diluted with EtOAc, washed with water, dried over anhydrous sodium sulfate, concentrated under reduced pressure to give a residue, which was purified by ISCO (80 g cartridge) eluting with DCM to 30% MeOH in DCM to give benzyl 15,15-bis(13,13-dimethyl-5,11-dioxo-2,12-dioxa-6,10-diazatetradecyl)-2,2-dimethyl-4,10,17-trioxo-3,13-dioxa-5,9,16-triazaoctacosan-28-oate (6.41 g, 5.78 mmol, 93% yield) as a colorless oil. ¹H NMR (400 MHz, DMSO-d₆) δ 7.80 (t, J=5.7 Hz, 3H), 7.39-7.30 (m, 5H), 6.95 (s, 1H), 6.74 (t, J=5.8 Hz, 3H), 5.07 (s, 2H), 3.53 (J, J=7.3 Hz, 6H), 3.51 (s, 6H), 3.02 (q, J=6.7 Hz, 6H), 2.94-2.85 (m, 6H), 2.29 (dt, J=26.1, 6.9 Hz, 8H), 2.02 (q, J=9.7, 8.6 Hz, 21-1), 1.56-1.39 (m, 10H), 1.35 (s, 27H), 1.20 (brs, 14H); MS (ESI): 1019.6 (M+H)⁺.

[1917] Step 6: To a solution of benzyl 15,15-bis(13,13-dimethyl-5,11-dioxo-2,12-dioxa-6,10-diazatetradecyl)-2,2-dimethyl-4,10,17-trioxo-3,13-dioxa-5,9,16-triazaoctacosan-28-oate (2.42 g, 2.183 mmol) in DCM (40 mL) was added 2,2,2-trifluoroacetic acid (8 ml, 105 mmol). The reaction mixture was stirred at room temperature for overnight. Solvent was evaporated under reduced pressure, co-evaporated with toluene (2×), triturated with ether, dried under high vacuum for overnight. Directly use TFA salt for next step.

[1918] Step 7: To a solution of 5-(((2R,3R,4R,5R,6R)-3-acetamido-4,5-diacetoxy-6-(acetoxymethyl)tetrahydro-2H-pyran-2-yl)oxy)pentanoic acid (3.91 g, 8.73 mmol), HBTU (3.48 g, 9.17 mmol) and HOBT (1.239 g, 9.17 mmol) in DCM (25 mL) was added DIPEA (6.08 ml, 34.9 mmol) followed by benzyl 12-((1,19-diamino-10-((3-((3-aminopropyl)amino)-3-oxopropoxy)methyl)-5,15-dioxo-8,12-dioxa-4,16-diazanonadecan-10-yl)amino)-12-oxododecanoate (1.764 g, 2.183 mmol) in DMF (4.0 mL). The mixture was stirred at room temperature for 5 hrs. Solvent was evaporated under reduced pressure to give a residue, which was purified by ISCO (40 g gold column) eluting with 5% MeOH in DCM for 5 column value to remove HOBt followed by 5% to 30% MeOH in DCM to give 1-(((2R,3R,4R,5R,6R)-3-acetamido-4,5-diacetoxy-6-(acetoxymethyl)tetrahydro-2H-pyran-2-yl)oxy)-16,16-bis((3-((3-(5-(((2R,3R,4R,5R,6R)-3-acetamido-4,5-diacetoxy-6-(acetoxymethyl)tetrahydro-2H-pyran-2-yl)oxy)pentanamido)propyl)amino)-3-oxopropoxy)methyl)-5,11,18-trioxo-14-oxa-6,10,17-triazanonacosan-29-oic benzyl ester (3.98 g, 87% yield) as a white solid. ¹H NMR (400 MHz, DMSO-d₆) δ 7.82-7.74 (m, 6H), 7.69 (t, J=5.6 Hz, 3H), 7.33-7.27 (m, 5H), 6.94 (s, 1H), 5.16 (d, J=3.4 Hz, 3H), 5.03 (s, 2H), 4.92 (dd, J=11.2, 3.4 Hz, 3H), 4.43 (d, J=8.4 Hz, 3H), 4.02-3.95 (m, 9H), 3.82 (dt, J=11.2, 8.8 Hz, 3H), 3.65 (dt, J=10.5, 5.6 Hz, 3H), 3.51-3.44 (m, 12H), 3.36 (dt, J=9.6, 6.0 Hz, 3H), 3.01-2.95 (m, 12H), 2.29 (t, J=7.4 Hz, 2H), 2.23 (t, J=6.3 Hz, 6H), 2.05 (s, 9H), 1.99 (t, J=7.0 Hz, 8H), 1.94 (s, 9H), 1.84 (s, 9H), 1.72 (s, 9H), 1.50 . . . 1.14 (m, 34H); MS (ESI): 1049.0 (M/2+H)⁺.

[1919] Step 8: To a round bottom flask flushed with Ar was added 10% Pd/C (165 mg, 0.835 mmol) and EtOAc (15 mL). A solution of Benzyl protected tris-GalNAc (1.75 g, 0.835 mmol) in methanol (15 mL) was added followed by triethylsilane (2.67 ml, 16.70 mmol) dropwise. The mixture was stirred at room temperature for 3 hrs. LC-MS showed the reaction was complete, diluted with EtOAc, and filtered through celite, washed with 20% MeOH in EtOAc, concentrated under reduced pressure to give 1 (((2R,3R,4R,5R,6R)-3-acetamido-4,5-diacetoxy-6-(acetoxymethyl)tetrahydro-2H-pyran-2-yl)oxy)-16,16-bis((3-((3-(5-(((2R,3R,4R,5R,6R)-3-acetamido-4,5-diacetoxy-6-(acetoxymethyl)tetrahydro-2H-pyran-2-yl)oxy)pentanamido)propyl)amino)-3-oxopropoxy)methyl)-5,11,18-trioxo-14-oxa-6,10,17-triazanonacosan-29-oic acid (1.67 g, 0.832 mmol, 100% yield) as a white solid. ¹H NMR (400 MHz, DMSO-d₆) δ 11.95 (s, 1H), 7.83-7.74 (m, 6H), 7.69 (t, J=5.7 Hz, 3H), 6.93 (s, 1H), 5.16 (d, J=3.4 Hz, 3H), 4.92 (dd, J=11.2, 3.4 Hz, 3H), 4.43 (d, J=8.4 Hz, 3H), 4.01-3.94 (m, 9H), 3.82 (dt, J=11.3, 8.8 Hz, 3H), 3.66 (dt, J=10.7, 5.6 Hz, 3H), 3.54-3.43 (m, 12H), 3.41-3.33 (m, 3H), 3.03-2.94 (m, 12H), 2.24 (t, J=7.4 Hz, 10H), 2.14 (t, J=7.4 Hz, 2H), 2.06 (s, 9H), 2.00 (t, J=7.2 Hz, 8H), 1.95 (s, 9H), 1.84 (s, 9H), 1.73 (s, 9H), 1.51-1.14 (m, 34H). MS (ES): 1003.8 (M/2+H)⁺.

### Example 39. Synthesis of Ligand

### Synthesis of 18,18-bis(17-((1 S,2R,3R,4R,5S)-4-acetamido-2,3-dihydroxy-6,8-dioxabicyclo[3.2.1]octan-1-yl)-5,11-dioxo-2,16-dioxa 6,10-diazaheptadecyl)-1-((1S2R,3R,4R,5S)-4-acetamido-2,3-dihydroxy-6,8-dioxabicyclo[3.2.1]octan-1-yl)-7,13,20-trioxo-2,16-dioxa-8,12,19-triazatetracosan-24-oic acid

[chemical structure]

[1921] Step 1: To a solution of ter i-butyl 5-bromopentanoate (4.0 g, 16.87 mmol) in acetone (80 mL) was added NaI (7.59 g, 50.6 mmol). The reaction mixture was stirred at 57° C. for 2 hrs, filtered, and washed with EtOAc. Solvent was evaporated under reduced pressure to give a residue, which was dissolved in EtOAc, washed with water, brine, dried over Na₂SO₄, concentrated to give a residue, which was purified by ISCO (40 g column) eluting with 20% EtOAc in hexane to 50% EtOAc in hexane to give tort-butyl 5-iodopentanoate 6 (4.54 g, 15.98 mmol, 95% yield) as a yellow oil. ¹H NMR (500 MHz, Chloroform-d) δ 3.19 (t, J=6.9 Hz, 2H), 2.24 (t, J=7.3 Hz, 2H), 1.86 (p, J=7.1 Hz, 2H), 1.70 (p, J=7.4 Hz, 2H), 1.45 (s, 9H).

[1922] Step 2: To a solution of N-((1S,2R,3R,4R,5S)-2,3-dihydroxy-1-(hydroxymethyl)-6,8-dioxabicyclo[3.2.1]octan-4-yl)acetamide (600 mg, 2.57 mmol) in DMF (15 mL) was added 2,2-dimethoxypropane (2087 μl, 17.03 mmol) followed by (+/−)-camphor-10-sulphonic acid (264 mg, 1.135 mmol). The reaction mixture was stirred at 70° C. for 24 hrs. The reaction mix turn was cooled down to mom temperature, and then methanol (2.5 mL) was added. The reaction mixture was stirred at room temperature for 30 minutes and neutralized with TEA (0.10 mL). The solvent was evaporated and the residue was coevaporated with toluene. The residue was purified by ISCO (24 g gold) eluting with EtOAc to 10% MeOH in EtOAc to give N-((3aR,4S,7S,8R,8aR)-4-(hydroxymethyl)-2,2-dimethylhexahydro-4,7-epoxy[1,3]dioxolo[4,5-d]oxepin-8-yl)acetamide 7 (666 mg, 2.437 mmol, 95% yield). ¹H NMR (500 MHz, DMSO-d₆) δ 8.09 (d, J=8.1 Hz, 1H), 5.1.5-5.05 (m, 2H), 4.26 (d, J=5.8 Hz, 1H), 4.09 (dd, J=7.3, 5.8 Hz, 1H), 3.80-3.60 (m, 5H), 1.83 (s, 3H), 1.37 (s, 3H), 1.26 (s, 3H); MS, 274.3 (M+H)⁺.

[1923] Step 3: To a solution of tert-butyl 5-iodopentanoate (1310 mg, 4.61 mmol) and N-((3aR,4S,7S,8R,8aR)-4-(hydroxymethyl)-2,2-dimethylhexahydro-4,7-epoxy[1,3]dioxolo[4,5-d]oxepin-8-yl)acetamide 7 (420 mg, 1.537 mmol) in DCM (10.5 mL) was added tetrabutylammonium hydrogensulfate (783 mg, 2.305 mmol) followed by 12.5 M sodium hydroxide solution (7 mL). The reaction mixture was stirred at room temperature for 24 hrs. The reaction mixture was diluted with DCM and water, extracted with DCM (2×).

[1924] The organic layer was washed with 1 N HCl solution, and dried over sodium sulfate. Solvent was concentrated under reduce pressure to give a residue. The resulting crude material was added ethyl acetate (30 mL) and sonicated for 5 minutes. The result precipitate was filtered, washed with ethyl acetate (10 mL×2). LC__MS showed the filter doens't contain desired product and was tetrabutylammonium salt. The filtrate was concentrated under reduced pressure to give a residue, which was purified by ISCO (40 g silica gel gold cartridge) eluting with 50% EtOAc in hexane to EtOAc to give tert-butyl 5-(((3aR,4S,7S,8R,8aR)-8-acetamido-2,2-dimethylhexahydro-4,7-epoxy[1,3]dioxolo[4,5-d]oxepin-4-yl)methoxy)pentanoate (0.470 g, 1.094 mmol, 71.2%) yield) as a yellowish oil. ¹H NMR (500 MHz, Chloroform-d) δ 5.56 (d, J=9.1 Hz, 1H), 4.21 (d, J=5.9 Hz, 1H), 4.12 (dtd, J=7.7, 3.8, 1.7 Hz, 1H), 3.99 (t, J=6.3 Hz, 1H), 3.90 (d, J=9.5 Hz, 1H), 3.77 (d, J=2.0 Hz, 2H), 3.67 (d, J=9.5 Hz, 1H), 3.52 (ddt, J=30.5, 9.2, 5.8 Hz, 2H), 2.23 (t, J=7.1 Hz, 2H), 2.03 (d, J=14.5 Hz, 3H), 1.65-1.55 (m, 7H), 1.44 (s, 9H), 1.35 (s. 3H); MS, 452.4 (M+Na)⁺.

[1925] Step 4: To a solution of benzyl 15,15-bis(13,13-dimethyl-5,11-dioxo-2,12-dioxa-6,10-diazatetradecyl)-2,2-dimethyl-4,10,17-trioxo-3,13-dioxa-5,9,16-triazahenicosan 21-oate (0.168 g, 0.166 mmol) in DCM (3 mL) was added TFA (3 mL). The reaction mixture was stirred at room temperature for 3 hrs. LC-MS showed the reaction was completed. Solvent was evaporated under reduced pressure to give benzyl 5-((1,19-diamino-10-0303 aminopropyl)amino)-3-oxopropoxy)methyl)-5,15-dioxo-8,12-dioxa 4,16-diazanonadecan-10-yl)amino)-5-oxopentanoate as a colorless oil. MS, 710.5 (M+H)⁺. Directly use for next step without purification.

[1926] Step 5: To a solution of tert-butyl 5-(((3aR,4S,7S,8R,8aR)-8-acetamido 2,2-dimethylhexahydro-4,7-epoxy[1,3]dioxolo[4,5-d]oxepin-4 yl)methoxy)pentanoate (285 mg, 0.664 mmol) in DCM (5 mL) was added TFA (5 mL) was stirred at room temperature for. 4 hrs. LC-MS showed the reaction was complete. Solvent was evaporated to give 5-(((1 S,2R,3R,4R,5S)₄-acetamido-2,3-dihydroxy-6,8-dioxabicyclo[3.2.1]octan-1-yl)methoxy)pentanoic acid. MS (ESI): 334.3 (M+H)⁺. Directly use for next step without purification.

[1927] Step 6: To a solution of 5-(((1S,2R,3R,4R,5S)-4-acetamido-2,3-dihydroxy-6,8-dioxabicyclo[3.2.1]octan-1-yl)methoxy)pentanoic acid (221 mg, 0.664 mmol) in DCM (10 mL) was added DIPEA (2313 μl, 13.28 mmol), HBTU (208 mg, 0.548 mmol), HOBT (67.3 mg, 0.498 mmol), a solution of benzyl. 5-((1,19-diamino-10-((3-((3-aminopropyl)amino)-3-oxopropoxy)methyl)-5,15-dioxo-8,12-dioxa-4,16-diazanonadecan-10-yl)amino)-5-oxopentanoate (118 mg, 0.166 mmol) (GL08-02) in DMF (3.0 mL) and DCM (5.0 mL). The reaction mixture was stirred at room temperature for overnight. LC-MS showed the desired product. Solvent was evaporated under reduced pressure to give a residue, which was purified by ISCO (24 g gold cartridge) eluting with DCM to 80% MeOH in DCM to give benzyl 18,18-bis(17-((1 S,2R,3R,4R,5S)-4-acetamido-2,3-dihydroxy-6,8-dioxabicyclo[3.2.1]octan-1-yl)-5,11-dioxo-2,16-dioxa 6,10-diazaheptadecyl)-1-((1S,2R,3R,4R,5S)-4-acetamido-2,3-dihydroxy-6,8-dioxabicyclo[3.2.1]octan-1-yl)-7,13,20-trioxo-2,16-dioxa-8,12,19-triazatetracosan-24-oate (272 mg 0.164 mmol, 99% yield) (product V tube 30 to 42 (40% MeOH in DCM to 60% MeOH in DCM) ¹H NMR (500 MHz, DMSO-d₆) δ 7.89 (d, J=7.8 Hz, 3H), 7.81 (t, J=5.7 Hz, 3H), 7.75 (s, 3H), 7.34 (q, J=7.5, 6.9 Hz, 5H), 7.05 (s, 1H), 5.07 (s. 5H), 4.83 (d, J=_=5.3 Hz, 3H), 4.56 (d, J=7.1. Hz, 3H), 3.73 (dd, J=23.3, 9.2 Hz, 6H), 3.64 (d, J=7.0 Hz, 6H), 3.58-3.35 (m, 27H), 3.02 (p, J=6.2 Hz, 12H), 2.33 (t, J=7.6 Hz, 2H), 2.26 (t, J=6.4 Hz, 6H), 2.10 (t, J=7.6 Hz, 2H), 2.04 (t, J=7.4 Hz, 6H), 1.82 (s, 9H), 1.72 (q, J=7.6 Hz, 2H), 1.52-1.39 (m, 18H); MS (ESI), 1656.3 (M+Hr.

[1928] Step 7: To a solution of benzyl 18,18-bis(17-((1S,2R,3R,4R,5S)-4-acetamido 2,3-dihydroxy-6,8-dioxabicyclo[3.2.1]octan-1-yl)-5,11-dioxo-2,16-dioxa-6,10-diazaheptadecyl)-1-((1 S,2R,3R,4R,5S)-4-acetamido-2,3-dihydroxy-6,8-dioxabicyclo[3.2.1]octan-1-yl)-7,13,20-trioxo-2,16-dioxa-8,12,19-triazatetracosan-24-oate (270 mg, 0.163 mmol) in EtOAc (10 mL) was added 10% Pd—C (50 mg), and MeOH (5.0 mL), and triethylsilane(1042 μl, 6.52 mmol). The reaction mixture was stirred at room temperature for 1 hr, filtered and concentrated to give 18,18-bis(17-((1S,2R,3R,4R,5S)-4-acetamido-2,3-dihydroxy-6,8-dioxabicyclo[3.2.1]octan-1-1)-5,11-dioxo-2,16-dioxa-6,10-diazaheptadecyl)-1-((1 S,2R,3R,4R,5S)-4-acetamido-2,3-dihydroxy-6,8-dioxabicyclo[3.2.1]octan-1-yl)-7,13,20-trioxo-2,16-dioxa-8,12,19-triazatetracosan-24-oic acid (246 mg, 0.157 mmol, 96%) yield) as a white solid. ¹H NMR (500 MHz, DMSO-d6) δ11.99 (brs, 1H), 7.89 (d, J=7.9 Hz, 3H), 7.82 (t, J=5.4 Hz, 3H), 7.75 (t, J=5.7 Hz, 3H), 7.03 (s, 1H), 5.07 (d, J=1.6 Hz, 3H), 4.83 (brs, 3H), 4.56 (brs, 3H), 3.79-3.68 (m, 6H), 3.64 (d, J=7.2 Hz, 6H), 3.58-3.34 (m. 27H), 3.02 (p, J=6.3 Hz, 12H), 2.27 (t, J=6.4 Hz, 6H), 2.17 (t, J=7.5 Hz, 2H), 2.08 (t, J=7.5 Hz, 2H), 2.04 (t, J=7.3 Hz, 6H), 1.82 (s, 9H), 1.65 (p, J=7.5 Hz, 2H), 1.54-1.40 (m, 18H); MS(ESI), 1566.3 (M+H)+.

### Example 40. Synthesis of Ligand

### Synthesis of 18,18-bis(17-((1S,2R,3R,4R,5S)-4-acetamido-2,3-dihydroxy-6,8-dioxabicyclo[3.2.1]octan-1-yl)-5,11-dioxo-2,16-dioxa 6,10-diazaheptadecyl)-1-((1S,2R,3R,4R,5S)-4-acetamido-2,3-dihydroxy-6,8-dioxabicyclo[3.2.1]octan-1-yl)-7,13,20-trioxo-2,16-dioxa-8,12,19-triazahentriacontan-31-oic acid

[chemical structure]

18,18-bis(17-((1 S,2R,3R,4R,5S)-4-acetamido-2,3-dihydroxy-6,8-dioxabicyclo[3.2.1]octan-1-yl)-5,11-dioxo-2,16-dioxa 6,10-diazaheptadecyl)-1-((1S,2R,3R,4R,5S)-4-acetamido 2,3-dihydroxy-6,8-dioxabicyclo[3.2.1]octan-1-yl)-7,13,20-dioxo-2,16-dioxa-8,12,19-triazahentriacontan-31-oic acid was synthesized using the same procedure as 18,18-bis(17-((1 S,2R,3R,4R,5S)-4-acetamido-2,3-dihydroxy-6,8-dioxabicyclo[3.2.1]octan-1-yl)-5,11-dioxo-2,16-dioxa-6,10-diazaheptadecyl)-1-((1 S,2R,3R,4R,5S)-4-acetamido-2,3-dihydroxy-6,8-dioxabicyclo[3.2.1]octan-1-yl)-7,13,20-trioxo-2,16-dioxa-8,12,19-triazatetracosan-24-oic acid. ¹H NMR (400 MHz, DMSO-d₆) δ 7.90 (d, J=7.8 Hz, 3H), 7.83 (t, J=5.7 Hz, 3H), 7.76 (t, J=5.7 Hz, 3H), 6.98 (d, J=6.2 Hz, 1H), 5.09 (s, 3H), 3.81-3.69 (m, 6H), 3.69-3.62 (m, 6H), 3.62-3.40 (m, 24H), 3.04 (p, J=6.1 Hz, 9H), 2.28 (t, J=6.4 Hz, 4H), 2.18 (t, J=7.3 Hz, 2H), 2.06 (t, J=7.7 Hz, 6H), 1.84 (s, 6H), 1.48 (tq, J=14.9, 7.4 Hz, 16H), 1.23 (s, 8H). MS(ESI), 1664.0 (M+H)⁺.

### EQUIVALENTS

[1930] Having described some illustrative embodiments of the present disclosure, it should be apparent to those skilled in the art that the foregoing is merely illustrative and not limiting, having been presented by way of example only. Numerous modifications and other illustrative embodiments are within the scope of one of ordinary skill in the art and are contemplated as falling within the scope of the disclosure. In particular, although many of the examples presented herein involve specific combinations of method acts or system elements, it should be understood that those acts and those elements may be combined in other ways to accomplish the same objectives. Acts, elements, and features discussed only in connection with one embodiment are not intended to be excluded from a similar role in other embodiments. Further, for the one or more means-plus-function limitations recited, for example, in claimed inventions, if any, the means are not intended to be limited to the means disclosed herein for performing the recited function, but are intended to cover in scope any means, known now or later developed, for performing the recited function.

[1931] Use of ordinal terms such as “first”, “second”, “third”, etc., in claims to modify a claim element does not by itself connote any priority, precedence, or order of one claim element over another or the temporal order in which acts of a method are performed, but are used merely as labels to distinguish one claim element having a certain name from another element having a same name (but for use of the ordinal term) to distinguish the claim elements. Similarly, use of a), b), etc., or i), ii), etc. does not by itself connote any priority, precedence, or order of steps in the claims. Similarly, use of these terms in the specification does not by itself connote any required priority, precedence, or order. Neither does use of any such terms indicate number of elements in described (including claimed) inventions.

[1932] The foregoing written specification is sufficient to enable one skilled in the art to practice any invention described in the present disclosure. The present disclosure is not to be limited in scope by examples provided, which are intended as illustrations of one or more aspects of described inventions and other functionally equivalent embodiments are within the scope of described inventions. Various modifications of described inventions in addition to those shown and described herein will become apparent to those skilled in the art from the foregoing description and fall within the scope of described inventions. Advantages and objects of described inventions are not necessarily encompassed by each embodiment of described inventions.

[1933] The foregoing written specification is considered to be sufficient to enable one skilled in the art to practice the invention. The present disclosure is not to be limited in scope by examples provided, since the examples are intended as a single illustration of one aspect of the invention and other functionally equivalent embodiments are within the scope of the invention. Various modifications of the invention in addition to those shown and described herein will become apparent to those skilled in the art from the foregoing description and fall within the scope of the appended Embodiments. The advantages and objects of the invention are not necessarily encompassed by each embodiment of the invention.

[1934] Throughout this application, various publications are referenced. The disclosures of these publications in their entireties are hereby incorporated by reference into this application for all purposes.

### Embodiments

[1935] 1. A compound having the Formula O1:

Y¹-L¹-(Z¹⁰)_{za} O1
[1936] or a pharmaceutically acceptable salt of said compound wherein Y¹ is an oligonucleotide targeting PNPLA3;
[1937] za is 1, 2, or 3; and
[1938] L¹ is a compound of Formula L11, L12, L13, L43, L44, L45, L46, L47, L48, L49, L50, L51, L52, L53 or L54 wherein the connection sites with Y¹ and Z¹⁰ are indicated:

[chemical structure]

[chemical structure]

[chemical structure]

[1939] wherein each T¹ is independently absent or is alkylene, alkenylene, or alkynylene, wherein one or more —CH₂— groups of the alkylene, alkenylene, or alkynylene may each independently be replaced with a heteroatom group independently selected from —O—, —S—, and —N(R⁴⁹)— wherein the heteroatom groups are separated by at least 2 carbon atoms;
[1940] each Q¹ is independently absent or is —C(O)—, —C(O) NR⁴⁹—, —NR⁴⁹—C(O)—, —O—C(O)—NR⁴⁹—. —NR⁴⁹—C(O)—O—, —CH₂—, —NR⁴⁹C(O)NR⁴⁹—, a bivalent heteroaryl group, or a heteroatom group selected from —O—, S—, —S—S—, —S(O)—, —S(O)₂—, and —NR⁴⁹—, wherein at least two carbon atoms separate the heteroatom groups O—, —S—, —S—S—, —S(O)—, —S(O)₂— and —NR⁴⁹— from any other heteroatom group, or a structure of the formula:

[chemical structure]

[1941] wherein R⁵³ is —O or —NH—, and R⁵⁴ is —O or —S;
[1942] each R⁴⁹ is independently —H, —(C₁-C₂₀)alkyl, or —(C₃-C₆)cycloalkyl wherein one to six —CH₂-groups of the alkyl or cycloalkyl separated by at least two carbon atoms may be replaced with —O—, —S—, or —N(R^{49a})—, and —CH₃ of the alkyl may be replaced with a heteroatom group selected from —N(R^{49a})₂, —OR^{49a}, and —S(R^{49a}) wherein the heteroatom groups are separated by at least 2 carbon atoms; and wherein the alkyl and cycloalkyl may be substituted with halo atoms and wherein each R^{49a} is independently —H, —(C₁-C₆)alkyl, or —(C₃-C₆)cycloalkyl;
[1943] R⁵³ is —O or —NH;
[1944] R⁵⁴ is —O or —S;
[1945] each n is independently 0, 1, 2, 3, 4, 5, 6, 7, 8, 9, 10, 1.1, 12, 13, 14, 15, 1.6, 17, 18, 19, 20, 21, 22, 23, 24, 25,26,27,28,29,30,31,32,33,34,35,36,37,38, 39, or 40; wherein if n is greater than 0, each T¹ and each Q¹ of each (T¹-Q¹-T¹-Q¹) is independently selected; and
[1946] each Z¹⁰ is independently a compound of Formula Z12, Z13, Z14, Z15, Z16, Z17, Z18, Z19, Z20, or Z21, or a geometrical or position isomer thereof, wherein the connection site with L¹ is indicated:

[chemical structure]

[1947] wherein each R⁴⁶ is independently —CN, —CH₂—CN, —C≡CH, —CH₂—N₃, —CH₂—NH₂, —CH₂—N(R⁵²)—S(O)₂—R⁵¹, —CH₂—CO₂H, —CO₂H, —CH₂—OH, —CH₂—SH, —CH═CH—R⁵¹, —CH₂—R⁵¹, —CH₂—S—R⁵¹, —CH₂—N(R⁵²)—R⁵¹, —CH₂—N(R⁵²)—C(O)—R⁵¹, —CH₂—N(R⁵²)—C(O)—O—R⁵¹, —CH₂—N(R⁵)—C(O)—N(R⁵²)—R⁵¹, —CH₂-O—R⁵¹, —CH₂—O—C(O)—R^{5′}, —CH₂—O—C(O)—N(R⁵—)—R⁵¹, —CH₂—O—C(O)—O—R⁵¹, —CH₂—S(O)—R⁵¹, —CH₂—S(O)₂—R⁵¹, —CH₂—S(O)₂—N(R⁵²)—R⁵¹, —C(O)—NH₂, —C(O)—O—R⁵¹, —C(O)—N(R⁵²)—R⁵¹, or aryl or heteroaryl, wherein the aryl or heteroaryl is optionally substituted with R⁵¹
[1948] each R⁴⁷ is independently —OH, —N₃, —N(R⁴⁸)₂, —N(R⁴)—C(O)—R⁴⁸)₂, —N(R⁴⁸)—C(O)—N(R⁴)₂, —N(R⁴⁸)—C(O)—OR⁴⁸, —N(R⁴⁸)—S(O)₂—R⁴⁵, tetrazole, or triazole, wherein the tetrazole and triazole are optionally substituted with R⁴⁸;
[1949] each R⁴⁵ is independently —H, —(C₁-C₅)alkyl, halo-substituted (C₁-C₅)alkyl, halo substituted —(C₃-C₆)cycloalkyl, —(C₁-C₅)alkenyl, —(C₁-C₅)alkynyl, halo substituted —(C₁-C₅)alkenyl, halo substituted —(C₁-C₅)alkynyl, or —(C₃-C₆)cycloalkyl, wherein a —CH₂— group of the alkyl or cycloalkyl may each be independently replaced with a heteroatom group selected from —O—, —S—, and —N(R⁵²)— and —CH₃ of the alkyl may each be independently replaced with a heteroatom group selected from —N(R⁵²)₂, —OR⁵², and —S(R⁵²) wherein the heteroatom groups are separated by at least 2 carbon atoms;
[1950] each R⁵¹ is independently —H, —(C₃-C₂₀)cycloalkyl, —(C₁-C₆₀)alkenyl, —(C₁-C₆₀)alkynyl, or —(C₁-C₆₀)alky l wherein one to six —CH₂— groups of the cycloalkyl or one to 20 —CH₂— groups of the alkyl may each be independently replaced with heteroatoms independently selected from —O—, —S—, and —N(R⁴⁹)— wherein the heteroatoms are separated by at least two carbon atoms, and —CH₃ of the alkyl may each be independently replaced with a heteroatom group selected from —N(R⁴⁹)₂, —OR⁴⁹, and —S(R⁴⁹) wherein the heteroatom groups are separated by at least 2 carbon atoms, and wherein the alkyl, alkenyl, alkynyl, and cycloalkyl may be substituted with halo atoms; and
[1951] each R⁵² is independently —H, —(C₁-C₂₀)alkyl, —(C₁-C₂₀)alkenyl, —(C₁-C₂₀)alkynyl, or —(C₃-C₆)cycloalkyl wherein one to six —CH₂— groups of the alkyl or cycloalkyl separated by at least two carbon atoms may each be independently replaced with a heteroatom independently selected from —O—, —S—, or —N(R⁴⁹)—, and —C₁-T₃ of the alkyl may each be independently replaced with a heteroatom group selected from —N(R⁴⁹)₂, —OR⁴⁹, and —S(R⁴⁹) wherein the heteroatom groups are separated by at least 2 carbon atoms; and wherein the alkyl, alkenyl, alkynyl, and cycloalkyl may be substituted with halo atoms.
   2. The compound of any one of the preceding embodiments, wherein Y¹ comprises at least 15 bases.
   3. The compound of any one of the preceding embodiments, wherein the base sequence of Y¹ comprises or is the base sequence of any PNPLA3 oligonucleotide listed in Table 1 A, or the base sequence of Y¹ comprises 15 contiguous bases of the sequence of any PNPLA3 oligonucleotide listed in Table 1A.
   4. The compound of any one of the preceding embodiments, wherein Y¹ comprises at least 1 phosphodiester internucleotidic linkage.
   5. The compound of any one of the preceding embodiments, wherein Y¹ comprises at least 1 chirally controlled modified internucleotidic linkage.
   6. The compound of any one of the preceding embodiments, Y¹ comprises at least 1 chirally controlled modified internucleotidic linkage which is a chirally controlled phosphorothioate.
   7. The compound of any one of the preceding embodiments, wherein Y¹ comprises at least 1 chirally controlled modified internucleotidic linkage which is a chirally controlled phosphorothioate in the Sp configuration.
   8. The compound of any one of the preceding embodiments, wherein Y¹ comprises at least 1 chirally controlled modified internucleotidic linkage which is a chirally controlled phosphorothioate in the Rp configuration.
   9. The compound of any one of the preceding embodiments, wherein Y¹, wherein the chirally controlled modified internucleotidic linkage or chirally controlled phosphorothioate comprises a phosphorus chiral center which has a diastereopurity of at least 70% within the composition.
   10. The compound of any one of the preceding embodiments, wherein Y¹, wherein the chirally controlled modified internucleotidic linkage or chirally controlled phosphorothioate comprises a phosphorus chiral center which has a diastereopurity of at least 70%, 75%, 80%, 85%, 90%, 91%, 92%, 93%, 94%, 95%, 96%, 97%, 98%, 99% or 99.5%.
   11. The compound of any one of the preceding embodiments, wherein Y¹ comprises at least 1 sugar modification.
   12. The compound of any one of the preceding embodiments, Y¹ comprises at least 1 base modification.
   13. The compound of any one of the preceding embodiments, wherein Y¹ further comprises a pattern of backbone linkages.
   14. The compound of any one of the preceding embodiments, wherein Y¹ further comprises a pattern of backbone chiral centers.
   15. The compound of any one of the preceding embodiments, wherein Y¹ further comprises a pattern of chemical modifications.
   16. The compound of any one of the preceding embodiments, wherein Y¹ further comprises a pattern of backbone linkages, a pattern of backbone chiral centers, and a pattern of chemical modifications.
   17. The compound of any one of the preceding embodiments, wherein the pattern of backbone linkages, the pattern of backbone chiral centers, and the pattern of chemical modifications of the oligonucleotide are the pattern of backbone linkages, the pattern of backbone chiral centers, and/or the pattern of chemical modifications of the oligonucleotide of any oligonucleotide listed in Table 1A.
   18. The compound of any one of the preceding embodiments, wherein the pattern of backbone linkages, the pattern of backbone chiral centers, and the pattern of chemical modifications of the oligonucleotide are the pattern of backbone linkages, the pattern of backbone chiral centers, and/or the pattern of chemical modifications of the oligonucleotide of an oligonucleotide listed in Table 1 A the base sequence of Y¹ comprises or is the base sequence of any PNPLA3 oligonucleotide listed in Table 1A, or the base sequence of Y¹ comprises 15 contiguous bases of the sequence of any PNPLA3 oligonucleotide listed in Table 1A.
   19. The compound of any one of the preceding embodiments, wherein the oligonucleotide is capable of mediating a decrease in the expression, level and/or activity of a PNPLA3 target gene or a gene product thereof.
   20. The compound of any one of the preceding embodiments, wherein the oligonucleotide is capable of mediating a decrease in the expression, level and/or activity of a PNPLA3 target gene or a gene product thereof via a mechanism mediated by RNaseH, steric hindrance and/or RNA interference.
   21. The compound of any one of the preceding embodiments wherein:
[1952] each T¹ is independently absent or is alkylene, wherein one or more —CH₂— groups of the alkylene, may each independently be replaced with a heteroatom group independently selected from —O—, and —N(R⁴⁹)— wherein the heteroatom groups are separated by at least 2 carbon atoms;
[1953] each Q¹ is independently absent or is —C(O), —C(O)—NR⁴⁹, —NR⁴⁹—C(O), or a heteroatom group selected from —O—, and —NR⁴⁹, wherein at least two carbon atoms separate the heteroatom groups —O— and —NR⁴⁹ from any other heteroatom group;
[1954] each R⁴⁹ is independently —H, —(C₁-C₆)alkyl, or —(C₃-C₆)cycloalkyl wherein the alkyl and cycloalkyl may be substituted with halo atoms;
[1955] each n is independently 0, 1, 2, 3 or 4; wherein if n is greater than 0, each T¹ and each Q¹ of each (T¹-Q¹-T¹-Q¹) is independently selected;
[1956] each R⁴⁶ is —CH₂—OH;
[1957] each R⁴⁷ is —N(R⁴⁸)—C(O)—R⁴⁸; and
[1958] each R⁴⁸ is independently —H, or —(C₁-C₅)alkyl.
   22. A compound having the Formula O2:

Y¹-L²-(L¹¹)_{za} O2
[1959] or a pharmaceutically acceptable salt thereof wherein Y¹ is an oligonucleotide targets PNPLA3;
[1960] za is 1, 2, or 3;
[1961] L² is a linking group; and
[1962] Z¹¹ is a compound of Formula (B), wherein connection site with L² is indicated:

[chemical structure]

[1963] each R⁴⁷ is independently —OH, —N₃, —N(R⁴⁸)₂, —N(R⁴⁸)—C(O)—R⁴⁸, —N(R⁴⁸)—C(O)—N(R⁴⁸)₂, —N(R⁴⁸)—C(O)—OR⁴⁸, —N(R⁴⁸)—S(O)₂—R⁴⁸, tetrazole, or triazole, wherein the tetrazole and triazole are optionally substituted with R⁴⁸;
[1964] each R⁴⁸ is independently —H, —(C₁-C₅)alkyl, halo-substituted —(C₁-C₅)alkyl, halo substituted —(C₃-C₆)cycloalkyl, —(C₁-C₅)alkenyl, —(C₁-C₅)alkynyl, halo substituted —(C₁-C₅)alkenyl, halo substituted —(C₁-C₅)alkynyl, or —(C₁-C₆)cycloakyl, wherein a —CH₂— group of the alkyl or cycloalkyl may each be independently replaced with a heteroatom group selected from —O—, —S—, and —N(R⁵²)— and —CH₃ of the alkyl may each be independently replaced with a heteroatom group selected from —N(R⁵²)₂, —OR⁵², and —S(R⁵²) wherein the heteroatom groups are separated by at least 2 carbon atoms;
[1965] each R⁴⁹ is independently —H, —(C₁-C₂₀)alkyl, or —(C₃-C₆)cycloalkyl wherein one to six —CH₂-groups of the alkyl or cycloalkyl separated by at least two carbon atoms may be replaced with —O—, —S—, or —N(R^{49a})—, and —CH₃ of the alkyl may be replaced with a heteroatom group selected from —N(R^{49a})₂, —OR⁴⁹a, and —S(R^{49a}) wherein the heteroatom groups are separated by at least 2 carbon atoms; and wherein the alkyl and cycloalkyl may be substituted with halo atoms and wherein each R^{49a} is independently —H, —(C₁-C₆)alkyl, or —(C₃-C₆)cycloalkyl;
[1966] each R⁵² is independently —H, —(C₁-C₂₀)alkyl, —(C₁-C₂₀)alkenyl, —(C₁-C₃₃)alkynyl, or —(C₃-C₆)cycloalkyl wherein one to six —CH₂— groups of the alkyl or cycloalkyl separated by at least two carbon atoms may each be independently replaced with a heteroatom independently selected from —O—, —S—, or —N(R⁴⁹)—, and —CH₃ of the alkyl may each be independently replaced with a heteroatom group selected from —N(R⁴⁹)₂, —OR⁴⁹, and —S(R⁴⁹) wherein the heteroatom groups are separated by at least 2 carbon atoms; and wherein the alkyl, alkenyl, alkynyl, and cycloalkyl may be substituted with halo atoms.
   23. The compound of any one of the preceding claims, wherein L² is a compound of Formula L1, L2, L3, L4, L5, L6, L7, L8, L9, L10, L1 1, L12, L13 or L14, wherein connection sites with Y¹ and Z¹¹ are indicated:

[chemical structure]

[chemical structure]

[1967] wherein each T¹ is independently absent or is alkylene, alkenylene, or alkynylene, wherein one or more —CH₂— groups of the alkylene, alkenylene, or alkynylene may each independently be replaced with a heteroatom group independently selected from —O—, —S—, and —N(R⁴⁹)— wherein the heteroatom groups are separated by at least 2 carbon atoms;
[1968] each Q¹ is independently absent or is —C(O)—, —C(O) NR⁴⁹—, —NR⁴⁹—C(O)—. —O—C(O)—NR⁴⁹—. —NR⁴⁹—C(O)—O—, —CH₂—, —NR⁴⁹C(O)NR⁴⁹—, a bivalent heteroaryl group, or a heteroatom group selected from —O—, S—, —S—S—, —S(O)—. —S(O)₂—, and —NR⁴⁹—, wherein at least two carbon atoms separate the heteroatom groups —O—, —S—, —S—S—, —S(O)—, —S(O)₂— and —NR⁴⁹— from any other heteroatom group, or a structure of the formula:

[chemical structure]

[1969] wherein R⁵³ is —O or —NH, and R⁵⁴ is —O or —S;
[1970] each R⁴⁹ is independently —H, —(C₁-C₂₀)alkyl, or —(C₃-C₆)cycloalkyl wherein one to six —CH₂-groups of the alkyl or cycloalkyl separated by at least two carbon atoms may be replaced with —O—, —S—, or —N(R^{49a})—, and —CH₃ of the alkyl may be replaced with a heteroatom group selected from —N(R^{49a})₂, —OR^{49a}, and —S(R^{49a}) wherein the heteroatom groups are separated by at least 2 carbon atoms; and wherein the alkyl and cycloalkyl may be substituted with halo atoms; and wherein each R^{49a} is independently —H, —(C₁-C₆)alkyl, or —(C₃-C₆)cycloalkyl;
[1971] R⁵³ is —O or —NH;
[1972] R⁵⁴ is —O or —S; and
[1973] each n is independently 0, 1, 2, 3, 4, 5, 6, 7, 8, 9, 10, 11, 12, 13, 14, 15, 16, 17, 18, 19, 20, 21, 22, 23, 24, 25,26,27,28,29,30,31,32,33,34,35,36,37,38, 39, or 40; wherein if n is greater than 0, each T¹ and each Q¹ of each (T¹-Q¹-T¹-Q¹) is independently selected.
   24. The compound of any one of the preceding embodiments, wherein Y¹ comprises at least 15 bases.
   25. The compound of any one of the preceding embodiments, wherein the base sequence of Y¹ comprises or is the base sequence of any PNPLA3 oligonucleotide listed in Table 1 A, or the base sequence of Y¹ comprises 15 contiguous bases of the sequence of any PNPLA3 oligonucleotide listed in Table 1A.
   26. The compound of any one of the preceding embodiments, wherein Y¹ comprises at least 1 phosphodiester internucleotidic linkage.
   27. The compound of any one of the preceding embodiments, wherein Y¹ comprises at least 1 chirally controlled modified internucleotidic linkage.
   28. The compound of any one of the preceding embodiments, Y¹ comprises at least 1 chirally controlled modified internucleotidic linkage which is a chirally controlled phosphorothioate.
   29. The compound of any one of the preceding embodiments, wherein Y¹ comprises at least 1 chirally controlled modified internucleotidic linkage which is a chirally controlled phosphorothioate in the Sp configuration.
   30. The compound of any one of the preceding embodiments, wherein Y¹ comprises at least 1 chirally controlled modified internucleotidic linkage which is a chirally controlled phosphorothioate in the Rp configuration.
   31. The compound of any one of the preceding embodiments, wherein Y¹, wherein the chirally controlled modified internucleotidic linkage or chirally controlled phosphorothioate comprises a phosphorus chiral center which has a diastereopurity of at least 70% within the composition.
   32. The compound of any one of the preceding embodiments, wherein Y¹, wherein the chirally controlled modified internucleotidic linkage or chirally controlled phosphorothioate comprises a phosphorus chiral center which has a diastereopurity of at least 70%, 75%, 80%, 85%, 90%, 91%, 92%, 93%, 94%, 95%, 96%, 97%, 98%, 99% or 99.5%.
   33. The compound of any one of the preceding embodiments, wherein Y¹ comprises at least 1 sugar modification.
   34. The compound of any one of the preceding embodiments, wherein Y¹ comprises at least 1 base modification.
   35. The compound of any one of the preceding embodiments, wherein the pattern of backbone linkages of the oligonucleotide is the pattern of backbone linkages of any oligonucleotide listed in Table 1A.
   36. The compound of any one of the preceding embodiments, wherein the pattern of backbone chiral centers of the oligonucleotide is the pattern of backbone chiral centers of any oligonucleotide listed in Table 1 A.
   37. The compound of any one of the preceding embodiments, wherein the pattern of chemical modifications of the oligonucleotide is the pattern of chemical modifications of any oligonucleotide listed in Table 1A.
   38. The compound of any one of the preceding embodiments, wherein the pattern of backbone linkages, the pattern of backbone chiral centers, and/or the pattern of chemical modifications of the oligonucleotide are the pattern of backbone linkages, the patter of backbone chiral centers, and/or the pattern of chemical modifications of the oligonucleotide of any oligonucleotide listed in Table 1A.
   39. The compound of any one of the preceding embodiments, wherein the pattern of backbone linkages, the pattern of backbone chiral centers, and the pattern of chemical modifications of the oligonucleotide are the pattern of backbone linkages, the pattern of backbone chiral centers, and/or the pattern of chemical modifications of the oligonucleotide of any oligonucleotide listed in Table 1 A.
   40. The compound of any one of the preceding embodiments, wherein the pattern of backbone linkages, the pattern of backbone chiral centers, and the pattern of chemical modifications of the oligonucleotide are the pattern of backbone linkages, the pattern of backbone chiral centers, and/or the pattern of chemical modifications of Y¹ is that of an oligonucleotide listed in Table 1A and the base sequence of Y¹ comprises or is the base sequence of any PNPLA3 oligonucleotide listed in Table 1 A, or the base sequence of Y¹ comprises 15 contiguous bases of the sequence of any PNPLA3 oligonucleotide listed in Table 1 A.
   41. The compound of any one of the preceding embodiments, wherein the oligonucleotide is capable of mediating a decrease in the expression, level and/or activity of a PNPLA3 target gene or a gene product thereof.
   42. The compound of any one of the preceding embodiments, wherein the oligonucleotide is capable of mediating a decrease in the expression, level and/or activity of a PNPLA3 target gene or a gene product thereof via a mechanism mediated by RNaseH, steric hindrance and/or RNA interference.
   43. The compound of any one of the preceding embodiments wherein:
[1974] each R⁴⁷ is —N(R⁴⁸)—C(O)—R⁴⁸; and
[1975] each R⁴⁸ is independently —H, or —(C₁-C₅)alkyl.
   44. The compound of any one of the preceding embodiments wherein:
[1976] each T¹ is independently absent or is alkylene, wherein
[1977] one or more —CH₂— groups of the alkylene, may each independently be replaced with a heteroatom group independently selected from —O—, and —N(R⁴⁹)— wherein the heteroatom groups are separated by at least 2 carbon atoms;
[1978] each Q¹ is independently absent or is C(O), C(O)—NR⁴⁹, NR⁴⁹—C(O), or a heteroatom group selected from O, and NR⁴⁹, wherein at least two carbon atoms separate the heteroatom groups O and NR⁴⁹ from any other heteroatom group;
[1979] each R⁴⁹ is independently —H, —(C₁-C₆)alkyl, or —(C₃-C₅)cycloalkyl wherein the alkyl and cycloalkyl may be substituted with halo atoms;
[1980] each n is independently 0, 1, 2, 3 or 4; wherein if n is greater than 0, each T¹ and each Q¹ of each (T¹-Q¹-T¹-Q¹) is independently selected.
   45. A composition comprising a compound comprising: (a) an oligonucleotide capable of targeting PNPLA3; (b) a linking group; and (c) 1, 2, or 3 moieties independently selected from Z¹⁰ and Z¹¹; wherein the linking group links the oligonucleotide and the 1, 2 or 3 moieties, and wherein:
[1981] each Z¹⁰ is independently a compound of Formula Z12, Z13, Z14, Z15, Z16, Z17, Z18, Z19, Z20, or Z21, or a geometrical or position isomer thereof, wherein the connection site with L¹ is indicated:

[chemical structure]

[1982] wherein each R⁴⁶ is independently —CN, —CH₂—CN, —C≡CH, —CH₂—N₃. —CH₂—NH₂, —CH₂—N(R⁵²)—S(O)₂—R⁵¹, —CH₂—CO₂H, —CO₂H, —CH₂-0H, —CH₂—SH, —CH═CH—R⁵¹, —CH₂—R⁵¹, —CH₂—S—R⁵¹, —CH₂—N(R⁵²)—R⁵¹. —CH₂—N(R⁵²)—C(O)—R^{5′}, —CH₂—N(R⁵²)—C(O)—O—R⁵¹, —CH₂—N(R⁵²)—C(O)—N(R⁵²)—R⁵¹, —CH₂—O—R⁵¹, —CH₂—O—C(O)—R⁵¹, —CH₂—O—C(O)—N(R⁵²)—R⁵¹, —CH₂—O—C(O)—O—R⁵¹, —CH₂—S(O)—R⁵¹, —CH_{Z}—S(O)₂—R^{5′}, —CH₂—S(O)₂—N(R⁵²)—R⁵¹, —C(O)—NH₂. —C(O)—O—R⁵¹. —C(O)—N(R⁵²)—R⁵¹, or aryl or heteroaryl, wherein the aryl or heteroaryl is optionally substituted with R⁵¹
[1983] each R⁴⁷ is independently —OH, —N₃, —N(R⁴⁸)₂, —N(R⁴⁵)—C(O)—R⁴⁸. —N(R⁴⁸)—C(O)—N(R)₂, —N(R⁴⁸)—C(O)—OR⁴⁸, —N(R⁴⁸)—S(O)₂—R⁴⁸, tetrazole, or triazole, wherein the tetrazole and triazole are optionally substituted with R⁴⁸;
[1984] each R⁴⁸ is independently —H, —(C₁-C₅)alkyl, halo-substituted (C₁-C₅)alkyl, halo substituted —(C₃-C₆)cycloakyl, —(C₁-C₅)alkenyl, —(C₁-C₅)alkynyl, halo substituted —(C₁-C₅)alkenyl, halo substituted (C₁-C₅)alkynyl, or —(C₃-C₆)cycloalkyl, wherein a —CH₂— group of the alkyl or cycloalkyl may each be independently replaced with a heteroatom group selected from —O—, —S—, and —N(R⁵²)— and —CH₃ of the alkyl may each be independently replaced with a heteroatom group selected from —N(R⁵²)₂, —OR⁵², and —S(R⁵²) wherein the heteroatom groups are separated by at least 2 carbon atoms;
[1985] each R⁵¹ is independently —H, —(C₃-C₂₀)cycloalkyl, —(C₁-C₆₀)alkenyl, —(C₁-C₆₀)alkynyl, or —(C₁-C₆₀)alkyl wherein one to six —CH₂— groups of the cycloalkyl or one to 20-CH₂— groups of the alkyl may each be independently replaced with heteroatoms independently selected from —O—, —S—, and —N(R⁴⁹)— wherein the heteroatoms are separated by at least two carbon atoms, and —CH₃ of the alkyl may each be independently replaced with a heteroatom group selected from —N(R⁴⁹)₂, —OR⁴⁹, and —S(R⁴⁹) wherein the heteroatom groups are separated by at least 2 carbon atoms, and wherein the alkyl, alkenyl, alkynyl, and cycloalkyl may be substituted with halo atoms; and
[1986] each R⁵² is independently —H, —(C₁-C₂₀)alkyl, —(C₁-C₂₀)alkenyl, —(C₁-C₂₀)alkynyl, or —(C₃-C₆)cycloalkyl wherein one to six —CH₂— groups of the alkyl or cycloalkyl separated by at least two carbon atoms may each be independently replaced with a heteroatom independently selected from —O—, —S—, or —N(R⁴⁹)—, and —CH₃ of the alkyl may each be independently replaced with a heteroatom group selected from —N(R⁴⁹)₂, —OR⁴⁹, and —S(R⁴⁹) wherein the heteroatom groups are separated by at least 2 carbon atoms; and wherein the alkyl, alkenyl, alkynyl, and cycloalkyl may be substituted with halo atoms;
[1987] each R⁴⁹ is independently —H, —(C₁-C₂₀)alkyl, or —(C₃-C₆)cycloalkyl wherein one to six —CH₂-groups of the alkyl or cycloalkyl separated by at least two carbon atoms may be replaced with —O—, —S—, or —N(R^{49a})—, and —CH₃ of the alkyl may be replaced with a heteroatom group selected from —N(R^{49a})₂, —OR^{49b}, and —S(R^{49a}) wherein the heteroatom groups are separated by at least 2 carbon atoms; and wherein the alkyl and cycloalkyl may be substituted with halo atoms and wherein each R^{49a} is independently —H, —(C₁-C₆)alkyl, or —(C₃-C₆)cycloalkyl;
[1988] each R⁴⁹³ is independently —H, —(C₁-C₆)alkyl, or —(C₃-C₆)cycloalkyl; and Z¹¹ is a compound of Formula (B), wherein connection site with L² is indicated:

[chemical structure]

[1989] each R⁴⁷ is independently —OH, —N₃, —N(R⁴⁸)₂, —N(R¹—C(O)—R⁴⁸, —N(R⁴⁸)—C(O)—N(R⁴)₂, N(R⁴⁸)—C(O)—OR⁴⁸, —N(R⁴⁸)—S(O)₂—R⁴⁸, tetrazole, or triazole, wherein the tetrazole and triazole are optionally substituted with R⁴⁸;
[1990] each R⁴⁸ is independently —H, —(C₁-C₅)alkyl, halo-substituted —(C₁-C₅)alkyl, halo substituted —(C₃-C₆)cycloalkyl, —(C₁-C₅)alkenyl, —(C₁-C₅)alkynyl, halo substituted —(C₁-C₅)alkenyl, halo substituted —(C₁-C₅)alkynyl, or —(C₃-C₆)cycloalkyl, wherein a —CH₂— group of the alkyl or cycloalkyl may each be independently replaced with a heteroatom group selected from —O—, —S—, and —N(R⁵²)— and —CH₃ of the alkyl may each be independently replaced with a heteroatom group selected from —N(R⁵²)₂, —OR⁵², and —S(R⁵²) wherein the heteroatom groups are separated by at least 2 carbon atoms;
[1991] each R⁴⁹ is independently —H, —(C₁-C₂₀)alkyl, or —(C₃-C₆)cycloalkyl wherein one to six —CH₂-groups of the alkyl or cycloalkyl separated by at least two carbon atoms may be replaced with —O—, —S—, or N(R^{49a})—, and —CH₃ of the alkyl may be replaced with a heteroatom group selected from —N(R^{49a})₂, —OR^{49a}, and —S(R^{49a}) wherein the heteroatom groups are separated by at least 2 carbon atoms; and wherein the alkyl and cycloalkyl may be substituted with halo atoms and wherein each R^{49a} is independently —H, —(C₁-C₆)alkyl, or —(C₃-C₆)cycloalkyl;
   [1992] each R⁵² is independently —H, —(C₁-C₂₀)alkyl, —(C₁-C₂₀)alkenyl, —(C₁-C₂₀)alkynyl, or —(C₃-C₆)cycloalkyl wherein one to six —CH₂— groups of the alkyl or cycloalkyl separated by at least two carbon atoms may each be independently replaced with a heteroatom independently selected from —O—, —S—, or —N(R⁴⁹)—, and —CH₃ of the alkyl may each be independently replaced with a heteroatom group selected from —N(R⁴⁹)₂, —OR⁴⁹, and —S(R⁴⁹) wherein the heteroatom groups are separated by at least 2 carbon atoms; and wherein the alkyl, alkenyl, alkynyl, and cycloalkyl may be substituted with halo atoms.
      47. A chirally controlled PNPLA3 oligonucleotide composition comprising oligonucleotides of a particular oligonucleotide type characterized by:
[1993] a) a common base sequence and length, wherein the base sequence is complementary to a PNPLA3 target gene;
[1994] b) a common pattern of backbone linkages;
[1995] c) a common pattern of backbone chiral centers, wherein the common pattern of backbone chiral centers comprises at least one internucleotidic linkage comprising a chirally controlled chiral center;
[1996] which composition is chirally controlled in that it is enriched, relative to a substantially racemic preparation of oligonucleotides having the same common base sequence and length, for oligonucleotides of the particular oligonucleotide type; and
[1997] wherein the oligonucleotide composition is capable of decreasing the expression, level and/or activity of a PNPLA3 target gene or a gene product thereof.
   48. The compound of any one of the preceding embodiments, wherein the oligonucleotides are capable of capable of decreasing the expression, level and/or activity of a PNPLA3 target gene or a gene product thereof via a mechanism mediated by RNaseH, steric hindrance and/or RNA interference.
   49. A composition comprising a compound of any one of the preceding embodiments.
   50. A composition comprising an PNPLA3 oligonucleotide which is a single-stranded RNAi agent, wherein the single stranded RNAi agent is complementary or substantially complementary to a PNPLA3 target RNA sequence,
[1998] has a length of about 15 to about 49 nucleotides, and
[1999] is capable of directing target-specific RNA interference,
[2000] wherein the single stranded RNAi agent comprises at least one non-natural base, sugar, and/or internucleotidic linkage, and
[2001] wherein the composition is capable of decreasing the expression, level and/or activity of a PNPLA3 target gene or a gene product thereof.
   51. The composition of any one of the preceding embodiments, wherein the oligonucleotide or oligonucleotides further comprise a bridged bicyclic ketal
   52. The composition of any one of the preceding embodiments, wherein R^{CD} is

[chemical structure]

53. The composition of any one of the preceding embodiments, wherein R^{CD} is

[chemical structure]

54. The composition of any one of the preceding embodiments, wherein R^{CD} is of such a structure that R^{CD}—H is

[chemical structure]

55. The composition of any one of the preceding embodiments, wherein R^{CM} is connected to the oligonucleotide or oligonucleotides through a linker.
56. The composition of any one of the preceding embodiments, wherein the linker is L^{M}.
57. The composition of any one of the preceding embodiments, wherein the linker has the structure of

[chemical structure]

58. The composition of any one of the preceding embodiments, wherein R^{CD} is selected from:

[chemical structure]

[chemical structure]

[chemical structure]

60. A pharmaceutical composition comprising a composition of any one of the preceding embodiments in a therapeutically effective amount, in admixture with at least one pharmaceutically acceptable excipient.
61. The composition of any one of the preceding embodiments further comprising at least one additional pharmaceutical agent selected from the group consisting of an anti-inflammatory agent, an anti-diabetic agent, and a cholesterol/lipid modulating agent.
62. The composition of any one of the preceding embodiments wherein said additional pharmaceutical agent is selected from the group consisting of an acetyl-CoA carboxylase- (ACC) inhibitor, a diacylglycerol O-acyltransferase 1 (DGAT-1) inhibitor, a diacylglycerol O-acyltransferase 2 (DGAT-2) inhibitor, monoacylglycerol O-acyltransferase inhibitors, a phosphodiesterase (PDE)-10 inhibitor, an AMPK activator, a sulfonylurea, a meglitinide, an α-amylase inhibitor, an α-glucoside hydrolase inhibitor, an α-glucosidase inhibitor, a PPARγ agonist, a PPAR α/γ agonist, a biguanide, a glucagon-like peptide 1 (GLP-1) modulator, liraglutide, albiglutide, exenatide, albiglutide, lixisenatide, dulaglutide, semaglutide, a protein tyrosine phosphatase-1B (PTP-1B) inhibitor, SIRT-1 activator, a dipeptidyl peptidase IV (DPP-IV) inhibitor, an insulin secretagogue, a fatty acid oxidation inhibitor, an A2 antagonist, a c-jun amino-terminal kinase (JNK) inhibitor, glucokinase activators (GKa), insulin, an insulin mimetic, a glycogen phosphorylase inhibitor, a VPAC2 receptor agonist, SGLT2 inhibitors, a glucagon receptor modulator, GPR119 modulators, FGF21 derivatives or analogs, TGR5 receptor modulators. GPBAR1 receptor modulators, GPR40 agonists, GPR120 modulators, high affinity nicotinic acid receptor (HM74A) activators, SGLT1 inhibitors, inhibitors or modulators of carnitine palmitoyl transferase enzymes, inhibitors of fructose 1,6-diphosphatase, inhibitors of aldose reductase, mineralocorticoid receptor inhibitors, inhibitors of TORC2, inhibitors of CCR2 and/or CCR5, inhibitors of PKC isoforms (e.g. PKCα, PKCβ, PKCγ), inhibitors of fatty acid synthetase, inhibitors of serine palmitoyl transferase, modulators of GPR81, GPR39, GPR43, GPR41, GPR105, Kv1.3, retinol binding protein 4, glucocorticoid receptor, somatostatin receptors, inhibitors or modulators of PDHK2 or PDHK4, inhibitors of MAP4K4, modulators of IL1 family including IL1 beta, HMG-CoA reductase inhibitors, squalene synthetase inhibitors, fibrates, bile acid sequestrants, ACAT inhibitors, MTP inhibitors, lipooxygenase inhibitors, cholesterol absorption inhibitors, PCSK9 modulators, cholesteryl ester transfer protein inhibitors and modulators of RXRalpha.
63. The composition of any one of the preceding embodiments further comprising at least one additional pharmaceutical agent selected from the group consisting of cystamine or a pharmaceutically acceptable salt thereof, cystamine or a pharmaceutically acceptable salt thereof, an anti-oxidant compound, lecithin, vitamin B complex, a bile salt preparations, an antagonists of Cannabinoid-1 (CB1) receptor, an inverse agonists of Cannabinoid-1 (CB1) receptor, a peroxisome proliferator-activated receptor) activity regulators, a benzothiazepine or benzothiepine compound, an RNA antisense construct to inhibit protein tyrosine phosphatase PTPRU, a heteroatom-linked substituted piperidine and derivatives thereof, an azacyclopentane derivative capable of inhibiting stearoyl-coenzyme alpha delta-9 desaturase, acylamide compound having secretagogue or inducer activity of adiponectin, a quaternary ammonium compound, Glatiramer acetate, pentraxin proteins, a HMG-CoA reductase inhibitor, n-acetyl cysteine, isoflavone compound, a macrolide antibiotic, a galectin inhibitor, an antibody, or any combination of thereof.
64. A method for the reduction of at least one point in severity of nonalcoholic fatty liver disease or nonalcoholic steatohepatitis grading scoring systems, reduction of the level of serum markers of nonalcoholic steatohepatitis activity, reduction of nonalcoholic steatohepatitis disease activity or reduction in the medical consequences of nonalcoholic steatohepatitis in humans comprising the step of administering to a human in need of such reduction a therapeutically effective amount of a composition of any one of the preceding embodiments to a patient in need thereof.
65. A method for treating fatty liver, nonalcoholic fatty liver disease, nonalcoholic steatohepatitis, nonalcoholic steatohepatitis with liver fibrosis, nonalcoholic steatohepatitis with cirrhosis, or nonalcoholic steatohepatitis with cirrhosis and hepatocellular carcinoma in humans comprising the step of administering to a human in need of such treatment a therapeutically effective amount of a composition of any one of the preceding embodiments to a patient in need thereof.
66. A method for treating hyperlipidemia, Type I diabetes, Type II diabetes mellitus, idiopathic Type I diabetes (Type Ib), latent autoimmune diabetes in adults (LADA), early-onset Type 2 diabetes (EOD), youth-onset atypical diabetes (YOAD), maturity onset diabetes of the young (MODY), malnutrition-related diabetes, gestational diabetes, coronary heart disease, ischemic stroke, restenosis after angioplasty, peripheral vascular disease, intermittent claudication, myocardial infarction, dyslipidemia, post-prandial lipemia, conditions of impaired glucose tolerance (IGT), conditions of impaired fasting plasma glucose, metabolic acidosis, ketosis, arthritis, obesity, osteoporosis, hypertension, congestive heart failure, left ventricular hypertrophy, peripheral arterial disease, diabetic retinopathy, macular degeneration, cataract, diabetic nephropathy, glomerulosclerosis, chronic renal failure, diabetic neuropathy, metabolic syndrome, syndrome X, premenstrual syndrome, angina pectoris, thrombosis, atherosclerosis, transient ischemic attacks, stroke, vascular restenosis, hyperglycemia, hyperinsulinemia, hypertriglyceridemia, insulin resistance, impaired glucose metabolism, erectile dysfunction, skin and connective tissue disorders, foot ulcerations and ulcerative colitis, endothelial dysfunction and impaired vascular compliance, hyper apo B lipoproteinemia, Alzheimer's, schizophrenia, impaired cognition, inflammatory bowel disease, ulcerative colitis, Crohn's disease, and irritable bowel syndrome, non-alcoholic steatohepatitis (NASH), or non alcoholic fatty liver disease (NAFLD), in humans comprising the step of administering to a human in need of such treatment a therapeutically effective amount of a composition of any one of the preceding embodiments to a patient in need thereof.
67. A method for treating fatty liver, nonalcoholic fatty liver disease, nonalcoholic steatohepatitis, nonalcoholic steatohepatitis with liver fibrosis, nonalcoholic steatohepatitis with cirrhosis, or nonalcoholic steatohepatitis with cirrhosis and hepatocellular carcinoma in humans comprising the step of administering to a human in need of such treatment a therapeutically effective amount of two separate pharmaceutical compositions comprising
[2002] a. a first composition of any one of the preceding embodiments; and
[2003] c. a second composition comprising at least one additional pharmaceutical agent selected from the group consisting of an anti-inflammatory agent, an anti-diabetic agent, and a cholesterol/lipid modulating agent and at least one pharmaceutically acceptable excipient.
   68. The method any one of the preceding embodiments wherein said first composition and said second composition are administered simultaneously.
   69. The method any one of the preceding embodiments wherein said first composition and said second composition are administered sequentially and in any order.
   70. A method for reducing portal hypertension, hepatic protein synthetic capability, hyperbilirubinemia, or encephalopathy in humans comprising the step of administering to a human in need of such treatment a therapeutically effective amount of a composition of any one of the preceding embodiments to a patient in need thereof.
   71. A method of decreasing the expression, activity and/or level of a PNPLA3 target gene or a gene product thereof in a cell, comprising the step of contacting the cell with a compound or composition of any one of the preceding embodiments.
   72. A method of decreasing the expression, activity and/or level of a PNPLA3 target gene or a gene product thereof in a patient, comprising the step of contacting the cell with a compound or composition of any one of the preceding embodiments.

1.-85. (canceled)

86. A composition comprising oligonucleotides of a particular oligonucleotide type characterized by:
a) a common base sequence;
b) a common pattern of backbone linkages;
c) a common pattern of backbone chiral centers;
wherein the oligonucleotide comprises at least one internucleotidic linkage comprising a linkage phosphorus in the Sp configuration;
wherein the composition is chirally controlled in that it is enriched, relative to a substantially racemic preparation of oligonucleotides having the same common base sequence, for oligonucleotides of the particular oligonucleotide type; and
wherein the common base sequence has over 50% identity with TGCCACUGUAGAAAGGCATGATU (SEQ ID NO: 696), wherein each U is optionally and independently replaced with T and vice versa.

87. The composition of claim 86, wherein oligonucleotides of the plurality share:
the same linkage phosphorus stereochemistry independently at five or more chiral internucleotidic linkages (“chirally controlled internucleotidic linkages”);
wherein about 10% of all oligonucleotides in the composition that share the common base sequence are oligonucleotides of the plurality; and
wherein the common base sequence is complementary to a portion of the base sequence of an PNPLA3 transcript, wherein the portion comprises 15 or more nucleobases.

88. The composition of claim 87, wherein oligonucleotides of the plurality share the same linkage phosphorus stereochemistry independently at five or more chiral internucleotidic linkages, and about 50%-100% of all oligonucleotides in the composition that share the common base sequence are oligonucleotides of the plurality.

89. The composition of claim 87, wherein oligonucleotides of the plurality share the same linkage phosphorus stereochemistry independently at each phosphorothioate internucleotidic linkage.

90. The composition of claim 87, wherein oligonucleotides of the plurality are of the same constitution.

91. The composition of claim 89, wherein the composition is a liquid composition.

92. The composition of claim 87, wherein oligonucleotides of the plurality each independently comprise a targeting moiety (R^{CD}).

93. The composition of claim 92, wherein R^{CD} is

[chemical structure]

94. The composition of claim 92, wherein R^{CD} is connected to the oligonucleotide or oligonucleotides through a linker.

95. The composition of claim 94, wherein the linker has the structure of

[chemical structure]

[chemical structure]

96. The composition of claim 94, wherein R^{CD} is selected from:

[chemical structure]

[chemical structure]

[chemical structure]

97. The composition of claim 86, wherein the common base sequence has over 60% identity with TGCCACUGUAGAAAGGCATGATU (SEQ ID NO: 696), wherein each U is optionally and independently replaced with T and vice versa.

98. The composition of claim 86, wherein the common base sequence has over 70% identity with TGCCACUGUAGAAAGGCATGATU (SEQ ID NO: 696), wherein each U is optionally and independently replaced with T and vice versa.

99. The composition of claim 86, wherein the common base sequence has over 80% identity with TGCCACUGUAGAAAGGCATGATU (SEQ ID NO: 696), wherein each U is optionally and independently replaced with T and vice versa.

100. A composition comprising oligonucleotides of a particular oligonucleotide type characterized by:
a) a common base sequence;
b) a common pattern of backbone linkages;
c) a common pattern of backbone chiral centers;
wherein the oligonucleotide comprises at least one internucleotidic linkage comprising a linkage phosphorus in the Sp configuration;
wherein the composition is chirally controlled in that it is enriched, relative to a substantially racemic preparation of oligonucleotides having the same common base sequence, for oligonucleotides of the particular oligonucleotide type; and
wherein the common base sequence has over 50% identity with GGACCTGAGGATGGACCGCG (SEQ ID NO: 717), wherein each U is optionally and independently replaced with T and vice versa.

101. The composition of claim 100, wherein oligonucleotides of the plurality share:
the same linkage phosphorus stereochemistry independently at five or more chiral internucleotidic linkages (“chirally controlled internucleotidic linkages”);
wherein about 10% of all oligonucleotides in the composition that share the common base sequence are oligonucleotides of the plurality; and
wherein the common base sequence is complementary to a portion of the base sequence of an PNPLA3 transcript, wherein the portion comprises 15 or more nucleobases.

102. A method for treating fatty liver, nonalcoholic fatty liver disease, nonalcoholic steatohepatitis, nonalcoholic steatohepatitis with liver fibrosis, nonalcoholic steatohepatitis with cirrhosis, or nonalcoholic steatohepatitis with cirrhosis and hepatocellular carcinoma in humans comprising the step of administering to a human in need of such treatment a therapeutically effective amount of a composition of claim 86, wherein the human has I148M mutation in a PNPLA3 allele.

103. A method for treating fatty liver, nonalcoholic fatty liver disease, nonalcoholic steatohepatitis, nonalcoholic steatohepatitis with liver fibrosis, nonalcoholic steatohepatitis with cirrhosis, or nonalcoholic steatohepatitis with cirrhosis and hepatocellular carcinoma in humans comprising the step of administering to a human in need of such treatment a therapeutically effective amount of a composition of claim 100.

104. A method for selectively reducing expression from a mutant PNPLA3 allele over a wild-type allele, wherein the mutant PNPLA3 allele comprises I148M, comprising contacting transcripts from the mutant PNPLA3 allele with a composition of claim 86.

The application's sequence listing, which the Patent Office published only in electronic form, follows.

SEQUENCE LISTING (1142 sequences)

SEQ ID NO: 1 - RNA, 21 nt, synthetic construct
  misc_feature 1..21: note = Description of Artificial Sequence: Synthetic oligonucleotide
  source 1..21: mol_type = other RNA
gcatagcgagcgagggaaaac

SEQ ID NO: 2 - RNA, 21 nt, synthetic construct
  misc_feature 1..21: note = Description of Artificial Sequence: Synthetic oligonucleotide
  source 1..21: mol_type = other RNA
gttttccctcgctcgctatgc

SEQ ID NO: 3 - RNA, 21 nt, synthetic construct
  misc_feature 1..21: note = Description of Artificial Sequence: Synthetic oligonucleotide
  source 1..21: mol_type = other RNA
gcatagcgagcgagggaaaac

SEQ ID NO: 4 - DNA, 21 bp, synthetic construct
  misc_feature 1..21: note = Synthetic oligonucleotide
  modified_base 2..5: mod_base = OTHER; note = uracil
  modified_base 9: mod_base = OTHER; note = uracil
  modified_base 13: mod_base = OTHER; note = uracil
  modified_base 17: mod_base = OTHER; note = uracil
  modified_base 19: mod_base = OTHER; note = uracil
  modified_base 21: mod_base = OTHER; note = uracil
  source 1..21: mol_type = other DNA
tttttccctcgctcgctattt

SEQ ID NO: 5 - DNA, 20 bp, synthetic construct
  misc_feature 1..20: note = Description of Artificial Sequence: Synthetic oligonucleotide
  source 1..20: mol_type = other DNA
aagggcatgaagcaggaaca

SEQ ID NO: 6 - DNA, 20 bp, synthetic construct
  misc_feature 1..20: note = Description of Artificial Sequence: Synthetic oligonucleotide
  source 1..20: mol_type = other DNA
gaagggcatgaagcaggaac

SEQ ID NO: 7 - DNA, 20 bp, synthetic construct
  misc_feature 1..20: note = Description of Artificial Sequence: Synthetic oligonucleotide
  source 1..20: mol_type = other DNA
agaagggcatgaagcaggaa

SEQ ID NO: 8 - DNA, 20 bp, synthetic construct
  misc_feature 1..20: note = Synthetic oligonucleotide
  modified_base 1: mod_base = OTHER; note = uracil
  source 1..20: mol_type = other DNA
tagaagggcatgaagcagga

SEQ ID NO: 9 - DNA, 20 bp, synthetic construct
  misc_feature 1..20: note = Synthetic oligonucleotide
  modified_base 2: mod_base = OTHER; note = uracil
  source 1..20: mol_type = other DNA
gtagaagggcatgaagcagg

SEQ ID NO: 10 - DNA, 20 bp, synthetic construct
  misc_feature 1..20: note = Synthetic oligonucleotide
  modified_base 1: mod_base = OTHER; note = uracil
  modified_base 3: mod_base = OTHER; note = uracil
  source 1..20: mol_type = other DNA
tgtagaagggcatgaagcag

SEQ ID NO: 11 - DNA, 20 bp, synthetic construct
  misc_feature 1..20: note = Synthetic oligonucleotide
  modified_base 2: mod_base = OTHER; note = uracil
  modified_base 4: mod_base = OTHER; note = uracil
  source 1..20: mol_type = other DNA
ctgtagaagggcatgaagca

SEQ ID NO: 12 - DNA, 20 bp, synthetic construct
  misc_feature 1..20: note = Synthetic oligonucleotide
  modified_base 3: mod_base = OTHER; note = uracil
  modified_base 5: mod_base = OTHER; note = uracil
  source 1..20: mol_type = other DNA
actgtagaagggcatgaagc

SEQ ID NO: 13 - DNA, 20 bp, synthetic construct
  misc_feature 1..20: note = Synthetic oligonucleotide
  modified_base 4: mod_base = OTHER; note = uracil
  modified_base 16: mod_base = OTHER; note = uracil
  source 1..20: mol_type = other DNA
cactgtagaagggcatgaag

SEQ ID NO: 14 - DNA, 20 bp, synthetic construct
  misc_feature 1..20: note = Synthetic oligonucleotide
  modified_base 5: mod_base = OTHER; note = uracil
  modified_base 17: mod_base = OTHER; note = uracil
  source 1..20: mol_type = other DNA
ccactgtagaagggcatgaa

SEQ ID NO: 15 - DNA, 20 bp, synthetic construct
  misc_feature 1..20: note = Synthetic oligonucleotide
  modified_base 1..2: mod_base = OTHER; note = uracil
  modified_base 16..17: mod_base = OTHER; note = uracil
  source 1..20: mol_type = other DNA
ttccgactcctggccttccg

SEQ ID NO: 16 - DNA, 20 bp, synthetic construct
  misc_feature 1..20: note = Synthetic oligonucleotide
  modified_base 1: mod_base = OTHER; note = uracil
  modified_base 16: mod_base = OTHER; note = uracil
  source 1..20: mol_type = other DNA
tccgactcctggccttccgc

SEQ ID NO: 17 - DNA, 20 bp, synthetic construct
  misc_feature 1..20: note = Description of Artificial Sequence: Synthetic oligonucleotide
  source 1..20: mol_type = other DNA
ccgactcctggccttccgca

SEQ ID NO: 18 - DNA, 20 bp, synthetic construct
  misc_feature 1..20: note = Synthetic oligonucleotide
  modified_base 4: mod_base = OTHER; note = uracil
  source 1..20: mol_type = other DNA
acctgaggatggaccgcggg

SEQ ID NO: 19 - DNA, 20 bp, synthetic construct
  misc_feature 1..20: note = Synthetic oligonucleotide
  modified_base 1: mod_base = OTHER; note = uracil
  modified_base 3: mod_base = OTHER; note = uracil
  modified_base 18: mod_base = OTHER; note = uracil
  source 1..20: mol_type = other DNA
tgtgcttggctcctgcctgg

SEQ ID NO: 20 - DNA, 20 bp, synthetic construct
  misc_feature 1..20: note = Synthetic oligonucleotide
  modified_base 2: mod_base = OTHER; note = uracil
  source 1..20: mol_type = other DNA
ctggacctgaggatggaccg

SEQ ID NO: 21 - DNA, 20 bp, synthetic construct
  misc_feature 1..20: note = Synthetic oligonucleotide
  modified_base 1: mod_base = OTHER; note = uracil
  modified_base 3..4: mod_base = OTHER; note = uracil
  modified_base 18..19: mod_base = OTHER; note = uracil
  source 1..20: mol_type = other DNA
tgttccgactcctggccttc

SEQ ID NO: 22 - DNA, 20 bp, synthetic construct
  misc_feature 1..20: note = Synthetic oligonucleotide
  modified_base 2..3: mod_base = OTHER; note = uracil
  modified_base 17..18: mod_base = OTHER; note = uracil
  source 1..20: mol_type = other DNA
gttccgactcctggccttcc

SEQ ID NO: 23 - DNA, 20 bp, synthetic construct
  misc_feature 1..20: note = Synthetic oligonucleotide
  modified_base 5: mod_base = OTHER; note = uracil
  source 1..20: mol_type = other DNA
cgactcctggccttccgcac

SEQ ID NO: 24 - DNA, 20 bp, synthetic construct
  misc_feature 1..20: note = Synthetic oligonucleotide
  modified_base 3: mod_base = OTHER; note = uracil
  modified_base 16: mod_base = OTHER; note = uracil
  modified_base 19: mod_base = OTHER; note = uracil
  source 1..20: mol_type = other DNA
cctgctgtgcttggctcctg

SEQ ID NO: 25 - DNA, 20 bp, synthetic construct
  misc_feature 1..20: note = Synthetic oligonucleotide
  modified_base 1: mod_base = OTHER; note = uracil
  modified_base 3..4: mod_base = OTHER; note = uracil
  modified_base 18: mod_base = OTHER; note = uracil
  source 1..20: mol_type = other DNA
tcttgttacccccgccatgg

SEQ ID NO: 26 - DNA, 20 bp, synthetic construct
  misc_feature 1..20: note = Synthetic oligonucleotide
  modified_base 3: mod_base = OTHER; note = uracil
  source 1..20: mol_type = other DNA
cctgcctcagtgtctcggcc

SEQ ID NO: 27 - DNA, 20 bp, synthetic construct
  misc_feature 1..20: note = Synthetic oligonucleotide
  modified_base 4: mod_base = OTHER; note = uracil
  modified_base 16: mod_base = OTHER; note = uracil
  source 1..20: mol_type = other DNA
ccctgcctcagtgtctcggc

SEQ ID NO: 28 - DNA, 20 bp, synthetic construct
  misc_feature 1..20: note = Synthetic oligonucleotide
  modified_base 1..2: mod_base = OTHER; note = uracil
  source 1..20: mol_type = other DNA
ttacccccgccatggagacg

SEQ ID NO: 29 - DNA, 20 bp, synthetic construct
  misc_feature 1..20: note = Synthetic oligonucleotide
  modified_base 19..20: mod_base = OTHER; note = uracil
  source 1..20: mol_type = other DNA
acccccgccatggagacgtt

SEQ ID NO: 30 - DNA, 20 bp, synthetic construct
  misc_feature 1..20: note = Synthetic oligonucleotide
  modified_base 5: mod_base = OTHER; note = uracil
  source 1..20: mol_type = other DNA
gacctgaggatggaccgcgg

SEQ ID NO: 31 - DNA, 20 bp, synthetic construct
  misc_feature 1..20: note = Description of Artificial Sequence: Synthetic oligonucleotide
  source 1..20: mol_type = other DNA
ggacctgaggatggaccgcg

SEQ ID NO: 32 - DNA, 20 bp, synthetic construct
  misc_feature 1..20: note = Synthetic oligonucleotide
  modified_base 1: mod_base = OTHER; note = uracil
  modified_base 20: mod_base = OTHER; note = uracil
  source 1..20: mol_type = other DNA
tacccccgccatggagacgt

SEQ ID NO: 33 - DNA, 20 bp, synthetic construct
  misc_feature 1..20: note = Synthetic oligonucleotide
  modified_base 20: mod_base = OTHER; note = uracil
  source 1..20: mol_type = other DNA
gggaccctctgcactgggct

SEQ ID NO: 34 - DNA, 20 bp, synthetic construct
  misc_feature 1..20: note = Synthetic oligonucleotide
  modified_base 3: mod_base = OTHER; note = uracil
  modified_base 17: mod_base = OTHER; note = uracil
  source 1..20: mol_type = other DNA
cctgggcgagagggtgtcca

SEQ ID NO: 35 - DNA, 20 bp, synthetic construct
  misc_feature 1..20: note = Synthetic oligonucleotide
  modified_base 18..20: mod_base = OTHER; note = uracil
  source 1..20: mol_type = other DNA
cccccgccatggagacgttt

SEQ ID NO: 36 - DNA, 20 bp, synthetic construct
  misc_feature 1..20: note = Synthetic oligonucleotide
  modified_base 1: mod_base = OTHER; note = uracil
  modified_base 3: mod_base = OTHER; note = uracil
  modified_base 16..17: mod_base = OTHER; note = uracil
  source 1..20: mol_type = other DNA
tctgctggacagcccttggg

SEQ ID NO: 37 - DNA, 20 bp, synthetic construct
  misc_feature 1..20: note = Synthetic oligonucleotide
  modified_base 2: mod_base = OTHER; note = uracil
  modified_base 16: mod_base = OTHER; note = uracil
  modified_base 19: mod_base = OTHER; note = uracil
  source 1..20: mol_type = other DNA
ctgcactgggcttcctggtg

SEQ ID NO: 38 - DNA, 20 bp, synthetic construct
  misc_feature 1..20: note = Synthetic oligonucleotide
  modified_base 1: mod_base = OTHER; note = uracil
  modified_base 4: mod_base = OTHER; note = uracil
  modified_base 17: mod_base = OTHER; note = uracil
  modified_base 20: mod_base = OTHER; note = uracil
  source 1..20: mol_type = other DNA
tcctgctgtgcttggctcct

SEQ ID NO: 39 - DNA, 20 bp, synthetic construct
  misc_feature 1..20: note = Synthetic oligonucleotide
  modified_base 2: mod_base = OTHER; note = uracil
  modified_base 5: mod_base = OTHER; note = uracil
  modified_base 18: mod_base = OTHER; note = uracil
  source 1..20: mol_type = other DNA
ctcctgctgtgcttggctcc

SEQ ID NO: 40 - DNA, 20 bp, synthetic construct
  misc_feature 1..20: note = Synthetic oligonucleotide
  modified_base 1: mod_base = OTHER; note = uracil
  source 1..20: mol_type = other DNA
tggacctgaggatggaccgc

SEQ ID NO: 41 - DNA, 20 bp, synthetic construct
  misc_feature 1..20: note = Synthetic oligonucleotide
  modified_base 1: mod_base = OTHER; note = uracil
  modified_base 16: mod_base = OTHER; note = uracil
  modified_base 18: mod_base = OTHER; note = uracil
  source 1..20: mol_type = other DNA
taccctgcctcagtgtctcg

SEQ ID NO: 42 - DNA, 20 bp, synthetic construct
  misc_feature 1..20: note = Synthetic oligonucleotide
  modified_base 16: mod_base = OTHER; note = uracil
  source 1..20: mol_type = other DNA
agggaccctctgcactgggc

SEQ ID NO: 43 - DNA, 20 bp, synthetic construct
  misc_feature 1..20: note = Synthetic oligonucleotide
  modified_base 2: mod_base = OTHER; note = uracil
  source 1..20: mol_type = other DNA
ctcaggcagcgggtcgcccc

SEQ ID NO: 44 - DNA, 20 bp, synthetic construct
  misc_feature 1..20: note = Synthetic oligonucleotide
  modified_base 3: mod_base = OTHER; note = uracil
  source 1..20: mol_type = other DNA
cctcagtgtctcggccaggg

SEQ ID NO: 45 - DNA, 20 bp, synthetic construct
  misc_feature 1..20: note = Synthetic oligonucleotide
  modified_base 2..4: mod_base = OTHER; note = uracil
  source 1..20: mol_type = other DNA
atttgggacctggaggcggg

SEQ ID NO: 46 - DNA, 20 bp, synthetic construct
  misc_feature 1..20: note = Synthetic oligonucleotide
  modified_base 2..3: mod_base = OTHER; note = uracil
  modified_base 5: mod_base = OTHER; note = uracil
  modified_base 17: mod_base = OTHER; note = uracil
  source 1..20: mol_type = other DNA
cttgttacccccgccatgga

SEQ ID NO: 47 - DNA, 20 bp, synthetic construct
  misc_feature 1..20: note = Synthetic oligonucleotide
  modified_base 4: mod_base = OTHER; note = uracil
  source 1..20: mol_type = other DNA
acatgggccagcctaccccc

SEQ ID NO: 48 - DNA, 20 bp, synthetic construct
  misc_feature 1..20: note = Synthetic oligonucleotide
  modified_base 1: mod_base = OTHER; note = uracil
  modified_base 4: mod_base = OTHER; note = uracil
  modified_base 17: mod_base = OTHER; note = uracil
  source 1..20: mol_type = other DNA
tgctgtgcttggctcctgcc

SEQ ID NO: 49 - DNA, 20 bp, synthetic construct
  misc_feature 1..20: note = Synthetic oligonucleotide
  modified_base 4: mod_base = OTHER; note = uracil
  modified_base 19: mod_base = OTHER; note = uracil
  source 1..20: mol_type = other DNA
acctgtgaggtcacccactg

SEQ ID NO: 50 - DNA, 20 bp, synthetic construct
  misc_feature 1..20: note = Synthetic oligonucleotide
  modified_base 2: mod_base = OTHER; note = uracil
  modified_base 4..5: mod_base = OTHER; note = uracil
  modified_base 19..20: mod_base = OTHER; note = uracil
  source 1..20: mol_type = other DNA
atgttccgactcctggcctt

SEQ ID NO: 51 - DNA, 20 bp, synthetic construct
  misc_feature 1..20: note = Synthetic oligonucleotide
  modified_base 2: mod_base = OTHER; note = uracil
  modified_base 4: mod_base = OTHER; note = uracil
  modified_base 17..18: mod_base = OTHER; note = uracil
  source 1..20: mol_type = other DNA
ctctgctggacagcccttgg

SEQ ID NO: 52 - RNA, 20 nt, synthetic construct
  misc_feature 1..20: note = Description of Artificial Sequence: Synthetic oligonucleotide
  source 1..20: mol_type = other RNA
gcctgggcgagagggtgtcc

SEQ ID NO: 53 - DNA, 20 bp, synthetic construct
  misc_feature 1..20: note = Synthetic oligonucleotide
  modified_base 2: mod_base = OTHER; note = uracil
  modified_base 5: mod_base = OTHER; note = uracil
  source 1..20: mol_type = other DNA
ctggtggacattggccggga

SEQ ID NO: 54 - DNA, 20 bp, synthetic construct
  misc_feature 1..20: note = Synthetic oligonucleotide
  modified_base 2: mod_base = OTHER; note = uracil
  modified_base 5: mod_base = OTHER; note = uracil
  source 1..20: mol_type = other DNA
ctgctccagcgggataccgg

SEQ ID NO: 55 - RNA, 20 nt, synthetic construct
  misc_feature 1..20: note = Description of Artificial Sequence: Synthetic oligonucleotide
  source 1..20: mol_type = other RNA
ttgttacccccgccatggag

SEQ ID NO: 56 - DNA, 20 bp, synthetic construct
  misc_feature 1..20: note = Synthetic oligonucleotide
  modified_base 1: mod_base = OTHER; note = uracil
  modified_base 3..4: mod_base = OTHER; note = uracil
  source 1..20: mol_type = other DNA
tgttacccccgccatggaga

SEQ ID NO: 57 - DNA, 20 bp, synthetic construct
  misc_feature 1..20: note = Synthetic oligonucleotide
  modified_base 19: mod_base = OTHER; note = uracil
  source 1..20: mol_type = other DNA
agcgctctctaccctgcctc

SEQ ID NO: 58 - DNA, 20 bp, synthetic construct
  misc_feature 1..20: note = Synthetic oligonucleotide
  modified_base 1: mod_base = OTHER; note = uracil
  source 1..20: mol_type = other DNA
tgggcgagagggtgtccagg

SEQ ID NO: 59 - DNA, 20 bp, synthetic construct
  misc_feature 1..20: note = Synthetic oligonucleotide
  modified_base 5: mod_base = OTHER; note = uracil
  modified_base 19: mod_base = OTHER; note = uracil
  source 1..20: mol_type = other DNA
aggctgggatcctccacgtc

SEQ ID NO: 60 - DNA, 20 bp, synthetic construct
  misc_feature 1..20: note = Synthetic oligonucleotide
  modified_base 1: mod_base = OTHER; note = uracil
  modified_base 4: mod_base = OTHER; note = uracil
  source 1..20: mol_type = other DNA
tggtggacattggccgggag

SEQ ID NO: 61 - DNA, 20 bp, synthetic construct
  misc_feature 1..20: note = Description of Artificial Sequence: Synthetic oligonucleotide
  source 1..20: mol_type = other DNA
agaggctgggatcctccacg

SEQ ID NO: 62 - DNA, 20 bp, synthetic construct
  misc_feature 1..20: note = Synthetic oligonucleotide
  modified_base 3: mod_base = OTHER; note = uracil
  source 1..20: mol_type = other DNA
gctggtggacattggccggg

SEQ ID NO: 63 - DNA, 20 bp, synthetic construct
  misc_feature 1..20: note = Synthetic oligonucleotide
  modified_base 1: mod_base = OTHER; note = uracil
  modified_base 3: mod_base = OTHER; note = uracil
  modified_base 16: mod_base = OTHER; note = uracil
  source 1..20: mol_type = other DNA
tctgctccagcgggataccg

SEQ ID NO: 64 - DNA, 20 bp, synthetic construct
  misc_feature 1..20: note = Synthetic oligonucleotide
  modified_base 1: mod_base = OTHER; note = uracil
  modified_base 3: mod_base = OTHER; note = uracil
  modified_base 17: mod_base = OTHER; note = uracil
  modified_base 20: mod_base = OTHER; note = uracil
  source 1..20: mol_type = other DNA
tctgcactgggcttcctggt

SEQ ID NO: 65 - DNA, 20 bp, synthetic construct
  misc_feature 1..20: note = Synthetic oligonucleotide
  modified_base 5: mod_base = OTHER; note = uracil
  modified_base 18: mod_base = OTHER; note = uracil
  source 1..20: mol_type = other DNA
gcgctctctaccctgcctca

SEQ ID NO: 66 - DNA, 20 bp, synthetic construct
  misc_feature 1..20: note = Synthetic oligonucleotide
  modified_base 2: mod_base = OTHER; note = uracil
  source 1..20: mol_type = other DNA
ctgcctcagtgtctcggcca

SEQ ID NO: 67 - DNA, 20 bp, synthetic construct
  misc_feature 1..20: note = Synthetic oligonucleotide
  modified_base 4: mod_base = OTHER; note = uracil
  source 1..20: mol_type = other DNA
gactcctggccttccgcaca

SEQ ID NO: 68 - DNA, 20 bp, synthetic construct
  misc_feature 1..20: note = Synthetic oligonucleotide
  modified_base 16: mod_base = OTHER; note = uracil
  modified_base 20: mod_base = OTHER; note = uracil
  source 1..20: mol_type = other DNA
cgacctcaggatccatccct

SEQ ID NO: 69 - DNA, 20 bp, synthetic construct
  misc_feature 1..20: note = Synthetic oligonucleotide
  modified_base 4: mod_base = OTHER; note = uracil
  modified_base 18: mod_base = OTHER; note = uracil
  source 1..20: mol_type = other DNA
ggctgggatcctccacgtca

SEQ ID NO: 70 - DNA, 20 bp, synthetic construct
  misc_feature 1..20: note = Synthetic oligonucleotide
  modified_base 1: mod_base = OTHER; note = uracil
  modified_base 3: mod_base = OTHER; note = uracil
  modified_base 16: mod_base = OTHER; note = uracil
  modified_base 19: mod_base = OTHER; note = uracil
  source 1..20: mol_type = other DNA
tctgctagactcgcctcctc

SEQ ID NO: 71 - DNA, 20 bp, synthetic construct
  misc_feature 1..20: note = Synthetic oligonucleotide
  modified_base 2: mod_base = OTHER; note = uracil
  modified_base 4..5: mod_base = OTHER; note = uracil
  modified_base 19: mod_base = OTHER; note = uracil
  source 1..20: mol_type = other DNA
atcttgttacccccgccatg

SEQ ID NO: 72 - DNA, 20 bp, synthetic construct
  misc_feature 1..20: note = Synthetic oligonucleotide
  modified_base 1: mod_base = OTHER; note = uracil
  modified_base 18: mod_base = OTHER; note = uracil
  modified_base 20: mod_base = OTHER; note = uracil
  source 1..20: mol_type = other DNA
tgcactgggcttcctggtgt

SEQ ID NO: 73 - DNA, 20 bp, synthetic construct
  misc_feature 1..20: note = Synthetic oligonucleotide
  modified_base 1: mod_base = OTHER; note = uracil
  source 1..20: mol_type = other DNA
tgcagagaccctgtcggagg

SEQ ID NO: 74 - DNA, 20 bp, synthetic construct
  misc_feature 1..20: note = Synthetic oligonucleotide
  modified_base 16: mod_base = OTHER; note = uracil
  source 1..20: mol_type = other DNA
cccagcaccttgagatccgg

SEQ ID NO: 75 - DNA, 20 bp, synthetic construct
  misc_feature 1..20: note = Synthetic oligonucleotide
  modified_base 3: mod_base = OTHER; note = uracil
  modified_base 5: mod_base = OTHER; note = uracil
  modified_base 18: mod_base = OTHER; note = uracil
  source 1..20: mol_type = other DNA
cctgtgaggtcacccactgc

SEQ ID NO: 76 - DNA, 20 bp, synthetic construct
  misc_feature 1..20: note = Synthetic oligonucleotide
  modified_base 2: mod_base = OTHER; note = uracil
  modified_base 16: mod_base = OTHER; note = uracil
  source 1..20: mol_type = other DNA
ctgggcatggcgacctcagg

SEQ ID NO: 77 - DNA, 20 bp, synthetic construct
  misc_feature 1..20: note = Description of Artificial Sequence: Synthetic oligonucleotide
  source 1..20: mol_type = other DNA
cgaactgcaccccttcccac

SEQ ID NO: 78 - DNA, 20 bp, synthetic construct
  misc_feature 1..20: note = Description of Artificial Sequence: Synthetic oligonucleotide
  source 1..20: mol_type = other DNA
agcgagcctgggcgagaggg

SEQ ID NO: 79 - DNA, 20 bp, synthetic construct
  misc_feature 1..20: note = Synthetic oligonucleotide
  modified_base 4: mod_base = OTHER; note = uracil
  modified_base 16: mod_base = OTHER; note = uracil
  modified_base 19: mod_base = OTHER; note = uracil
  source 1..20: mol_type = other DNA
gggtggcctctgctttggtc

SEQ ID NO: 80 - DNA, 20 bp, synthetic construct
  misc_feature 1..20: note = Synthetic oligonucleotide
  modified_base 1: mod_base = OTHER; note = uracil
  modified_base 4: mod_base = OTHER; note = uracil
  source 1..20: mol_type = other DNA
tgctccagcgggataccgga

SEQ ID NO: 81 - DNA, 20 bp, synthetic construct
  misc_feature 1..20: note = Synthetic oligonucleotide
  modified_base 17: mod_base = OTHER; note = uracil
  source 1..20: mol_type = other DNA
aagggaccctctgcactggg

SEQ ID NO: 82 - DNA, 20 bp, synthetic construct
  misc_feature 1..20: note = Synthetic oligonucleotide
  modified_base 2: mod_base = OTHER; note = uracil
  modified_base 5: mod_base = OTHER; note = uracil
  modified_base 18: mod_base = OTHER; note = uracil
  source 1..20: mol_type = other DNA
ctgctgtgcttggctcctgc

SEQ ID NO: 83 - DNA, 20 bp, synthetic construct
  misc_feature 1..20: note = Synthetic oligonucleotide
  modified_base 16..17: mod_base = OTHER; note = uracil
  source 1..20: mol_type = other DNA
gacgaactgcaccccttccc

SEQ ID NO: 84 - DNA, 20 bp, synthetic construct
  misc_feature 1..20: note = Synthetic oligonucleotide
  modified_base 1: mod_base = OTHER; note = uracil
  modified_base 4: mod_base = OTHER; note = uracil
  source 1..20: mol_type = other DNA
tgctgtagcgagcctgggcg

SEQ ID NO: 85 - DNA, 20 bp, synthetic construct
  misc_feature 1..20: note = Synthetic oligonucleotide
  modified_base 18: mod_base = OTHER; note = uracil
  source 1..20: mol_type = other DNA
caccccttcccacagcatgg

SEQ ID NO: 86 - DNA, 20 bp, synthetic construct
  misc_feature 1..20: note = Synthetic oligonucleotide
  modified_base 18..19: mod_base = OTHER; note = uracil
  source 1..20: mol_type = other DNA
gaccctctgcactgggcttc

SEQ ID NO: 87 - DNA, 20 bp, synthetic construct
  misc_feature 1..20: note = Synthetic oligonucleotide
  modified_base 4: mod_base = OTHER; note = uracil
  source 1..20: mol_type = other DNA
agctggtggacattggccgg

SEQ ID NO: 88 - DNA, 20 bp, synthetic construct
  misc_feature 1..20: note = Synthetic oligonucleotide
  modified_base 1: mod_base = OTHER; note = uracil
  modified_base 3: mod_base = OTHER; note = uracil
  modified_base 16: mod_base = OTHER; note = uracil
  source 1..20: mol_type = other DNA
tctcggccagggcattccca

SEQ ID NO: 89 - DNA, 20 bp, synthetic construct
  misc_feature 1..20: note = Synthetic oligonucleotide
  modified_base 3: mod_base = OTHER; note = uracil
  modified_base 5: mod_base = OTHER; note = uracil
  modified_base 20: mod_base = OTHER; note = uracil
  source 1..20: mol_type = other DNA
ggtctctgctggacagccct

SEQ ID NO: 90 - DNA, 20 bp, synthetic construct
  misc_feature 1..20: note = Description of Artificial Sequence: Synthetic oligonucleotide
  source 1..20: mol_type = other DNA
cggccagggcattcccagcg

SEQ ID NO: 91 - DNA, 20 bp, synthetic construct
  misc_feature 1..20: note = Synthetic oligonucleotide
  modified_base 1: mod_base = OTHER; note = uracil
  source 1..20: mol_type = other DNA
tgggatcctccacgtcacag

SEQ ID NO: 92 - DNA, 20 bp, synthetic construct
  misc_feature 1..20: note = Synthetic oligonucleotide
  modified_base 3: mod_base = OTHER; note = uracil
  modified_base 5: mod_base = OTHER; note = uracil
  modified_base 17: mod_base = OTHER; note = uracil
  source 1..20: mol_type = other DNA
cctgttggctgctcactggc

SEQ ID NO: 93 - DNA, 20 bp, synthetic construct
  misc_feature 1..20: note = Synthetic oligonucleotide
  modified_base 4: mod_base = OTHER; note = uracil
  modified_base 18: mod_base = OTHER; note = uracil
  source 1..20: mol_type = other DNA
gcctgttggctgctcactgg

SEQ ID NO: 94 - DNA, 20 bp, synthetic construct
  misc_feature 1..20: note = Description of Artificial Sequence: Synthetic oligonucleotide
  source 1..20: mol_type = other DNA
ccagcaccttgagatccggg

SEQ ID NO: 95 - DNA, 20 bp, synthetic construct
  misc_feature 1..20: note = Synthetic oligonucleotide
  modified_base 16: mod_base = OTHER; note = uracil
  modified_base 19: mod_base = OTHER; note = uracil
  source 1..20: mol_type = other DNA
gggaggcctgttggctgctc

SEQ ID NO: 96 - DNA, 20 bp, synthetic construct
  misc_feature 1..20: note = Synthetic oligonucleotide
  modified_base 2: mod_base = OTHER; note = uracil
  modified_base 18: mod_base = OTHER; note = uracil
  source 1..20: mol_type = other DNA
ctcagaggctgggatcctcc

SEQ ID NO: 97 - DNA, 20 bp, synthetic construct
  misc_feature 1..20: note = Synthetic oligonucleotide
  modified_base 4: mod_base = OTHER; note = uracil
  source 1..20: mol_type = other DNA
gcctcagtgtctcggccagg

SEQ ID NO: 98 - DNA, 20 bp, synthetic construct
  misc_feature 1..20: note = Synthetic oligonucleotide
  modified_base 5: mod_base = OTHER; note = uracil
  source 1..20: mol_type = other DNA
cacatgggccagcctacccc

SEQ ID NO: 99 - DNA, 20 bp, synthetic construct
  misc_feature 1..20: note = Synthetic oligonucleotide
  modified_base 3: mod_base = OTHER; note = uracil
  modified_base 18: mod_base = OTHER; note = uracil
  modified_base 20: mod_base = OTHER; note = uracil
  source 1..20: mol_type = other DNA
ggtggcctctgctttggtct

SEQ ID NO: 100 - DNA, 20 bp, synthetic construct
  misc_feature 1..20: note = Synthetic oligonucleotide
  modified_base 4..5: mod_base = OTHER; note = uracil
  modified_base 18: mod_base = OTHER; note = uracil
  source 1..20: mol_type = other DNA
acgttgtcactcactcctcc

SEQ ID NO: 101 - DNA, 20 bp, synthetic construct
  misc_feature 1..20: note = Synthetic oligonucleotide
  modified_base 1: mod_base = OTHER; note = uracil
  source 1..20: mol_type = other DNA
tagaaaggcatgaagcagga

SEQ ID NO: 102 - DNA, 20 bp, synthetic construct
  misc_feature 1..20: note = Synthetic oligonucleotide
  modified_base 2: mod_base = OTHER; note = uracil
  source 1..20: mol_type = other DNA
gtagaaaggcatgaagcagg

SEQ ID NO: 103 - DNA, 20 bp, synthetic construct
  misc_feature 1..20: note = Synthetic oligonucleotide
  modified_base 1: mod_base = OTHER; note = uracil
  modified_base 3: mod_base = OTHER; note = uracil
  source 1..20: mol_type = other DNA
tgtagaaaggcatgaagcag

SEQ ID NO: 104 - DNA, 20 bp, synthetic construct
  misc_feature 1..20: note = Synthetic oligonucleotide
  modified_base 2: mod_base = OTHER; note = uracil
  modified_base 4: mod_base = OTHER; note = uracil
  source 1..20: mol_type = other DNA
ctgtagaaaggcatgaagca

SEQ ID NO: 105 - DNA, 20 bp, synthetic construct
  misc_feature 1..20: note = Synthetic oligonucleotide
  modified_base 3: mod_base = OTHER; note = uracil
  modified_base 5: mod_base = OTHER; note = uracil
  source 1..20: mol_type = other DNA
actgtagaaaggcatgaagc

SEQ ID NO: 106 - DNA, 20 bp, synthetic construct
  misc_feature 1..20: note = Synthetic oligonucleotide
  modified_base 4: mod_base = OTHER; note = uracil
  modified_base 16: mod_base = OTHER; note = uracil
  source 1..20: mol_type = other DNA
cactgtagaaaggcatgaag

SEQ ID NO: 107 - DNA, 20 bp, synthetic construct
  misc_feature 1..20: note = Synthetic oligonucleotide
  modified_base 5: mod_base = OTHER; note = uracil
  modified_base 17: mod_base = OTHER; note = uracil
  source 1..20: mol_type = other DNA
ccactgtagaaaggcatgaa

SEQ ID NO: 108 - DNA, 25 bp, synthetic construct
  misc_feature 1..25: note = Synthetic oligonucleotide
  modified_base 1: mod_base = OTHER; note = uracil
  modified_base 24: mod_base = OTHER; note = uracil
  source 1..25: mol_type = other DNA
tagaaaggcatgaagcaggaacata

SEQ ID NO: 109 - DNA, 25 bp, synthetic construct
  misc_feature 1..25: note = Synthetic oligonucleotide
  modified_base 2: mod_base = OTHER; note = uracil
  modified_base 25: mod_base = OTHER; note = uracil
  source 1..25: mol_type = other DNA
gtagaaaggcatgaagcaggaacat

SEQ ID NO: 110 - DNA, 25 bp, synthetic construct
  misc_feature 1..25: note = Synthetic oligonucleotide
  modified_base 1: mod_base = OTHER; note = uracil
  modified_base 3: mod_base = OTHER; note = uracil
  source 1..25: mol_type = other DNA
tgtagaaaggcatgaagcaggaaca

SEQ ID NO: 111 - DNA, 25 bp, synthetic construct
  misc_feature 1..25: note = Synthetic oligonucleotide
  modified_base 2: mod_base = OTHER; note = uracil
  modified_base 4: mod_base = OTHER; note = uracil
  source 1..25: mol_type = other DNA
ctgtagaaaggcatgaagcaggaac

SEQ ID NO: 112 - DNA, 25 bp, synthetic construct
  misc_feature 1..25: note = Synthetic oligonucleotide
  modified_base 3: mod_base = OTHER; note = uracil
  modified_base 5: mod_base = OTHER; note = uracil
  source 1..25: mol_type = other DNA
actgtagaaaggcatgaagcaggaa

SEQ ID NO: 113 - DNA, 25 bp, synthetic construct
  misc_feature 1..25: note = Synthetic oligonucleotide
  modified_base 4: mod_base = OTHER; note = uracil
  source 1..25: mol_type = other DNA
cactgtagaaaggcatgaagcagga

SEQ ID NO: 114 - DNA, 25 bp, synthetic construct
  misc_feature 1..25: note = Synthetic oligonucleotide
  modified_base 5: mod_base = OTHER; note = uracil
  source 1..25: mol_type = other DNA
ccactgtagaaaggcatgaagcagg

SEQ ID NO: 115 - DNA, 25 bp, synthetic construct
  misc_feature 1..25: note = Description of Artificial Sequence: Synthetic oligonucleotide
  source 1..25: mol_type = other DNA
gccactgtagaaaggcatgaagcag

SEQ ID NO: 116 - DNA, 25 bp, synthetic construct
  misc_feature 1..25: note = Description of Artificial Sequence: Synthetic oligonucleotide
  source 1..25: mol_type = other DNA
ggccactgtagaaaggcatgaagca

SEQ ID NO: 117 - DNA, 25 bp, synthetic construct
  misc_feature 1..25: note = Description of Artificial Sequence: Synthetic oligonucleotide
  source 1..25: mol_type = other DNA
aggccactgtagaaaggcatgaagc

SEQ ID NO: 118 - DNA, 25 bp, synthetic construct
  misc_feature 1..25: note = Synthetic oligonucleotide
  modified_base 21: mod_base = OTHER; note = uracil
  source 1..25: mol_type = other DNA
aaggccactgtagaaaggcatgaag

SEQ ID NO: 119 - DNA, 25 bp, synthetic construct
  misc_feature 1..25: note = Synthetic oligonucleotide
  modified_base 1: mod_base = OTHER; note = uracil
  modified_base 22: mod_base = OTHER; note = uracil
  source 1..25: mol_type = other DNA
taaggccactgtagaaaggcatgaa

SEQ ID NO: 120 - DNA, 21 bp, synthetic construct
  misc_feature 1..21: note = Synthetic oligonucleotide
  modified_base 3: mod_base = OTHER; note = uracil
  modified_base 9: mod_base = OTHER; note = uracil
  modified_base 21: mod_base = OTHER; note = uracil
  source 1..21: mol_type = other DNA
tctgaggatggaccgcgggtt

SEQ ID NO: 121 - DNA, 21 bp, synthetic construct
  misc_feature 1..21: note = Synthetic oligonucleotide
  modified_base 3: mod_base = OTHER; note = uracil
  modified_base 9: mod_base = OTHER; note = uracil
  modified_base 21: mod_base = OTHER; note = uracil
  source 1..21: mol_type = other DNA
tctgaggatggaccgcgggtt

SEQ ID NO: 122 - DNA, 21 bp, synthetic construct
  misc_feature 1..21: note = Synthetic oligonucleotide
  modified_base 3: mod_base = OTHER; note = uracil
  modified_base 9: mod_base = OTHER; note = uracil
  modified_base 21: mod_base = OTHER; note = uracil
  source 1..21: mol_type = other DNA
tctgaggatggaccgcgggtt

SEQ ID NO: 123 - DNA, 21 bp, synthetic construct
  misc_feature 1..21: note = Synthetic oligonucleotide
  modified_base 5: mod_base = OTHER; note = uracil
  modified_base 11: mod_base = OTHER; note = uracil
  modified_base 21: mod_base = OTHER; note = uracil
  source 1..21: mol_type = other DNA
tacctgaggatggaccgcgtt

SEQ ID NO: 124 - DNA, 21 bp, synthetic construct
  misc_feature 1..21: note = Synthetic oligonucleotide
  modified_base 5: mod_base = OTHER; note = uracil
  modified_base 11: mod_base = OTHER; note = uracil
  modified_base 21: mod_base = OTHER; note = uracil
  source 1..21: mol_type = other DNA
tacctgaggatggaccgcgtt

SEQ ID NO: 125 - DNA, 21 bp, synthetic construct
  misc_feature 1..21: note = Synthetic oligonucleotide
  modified_base 6: mod_base = OTHER; note = uracil
  modified_base 12: mod_base = OTHER; note = uracil
  modified_base 21: mod_base = OTHER; note = uracil
  source 1..21: mol_type = other DNA
tgacctgaggatggaccgctt

SEQ ID NO: 126 - DNA, 21 bp, synthetic construct
  misc_feature 1..21: note = Synthetic oligonucleotide
  modified_base 6: mod_base = OTHER; note = uracil
  modified_base 12: mod_base = OTHER; note = uracil
  modified_base 21: mod_base = OTHER; note = uracil
  source 1..21: mol_type = other DNA
tgacctgaggatggaccgctt

SEQ ID NO: 127 - DNA, 21 bp, synthetic construct
  misc_feature 1..21: note = Synthetic oligonucleotide
  modified_base 2..3: mod_base = OTHER; note = uracil
  modified_base 5..6: mod_base = OTHER; note = uracil
  modified_base 17: mod_base = OTHER; note = uracil
  modified_base 21: mod_base = OTHER; note = uracil
  source 1..21: mol_type = other DNA
tttgttacccccgccatggtt

SEQ ID NO: 128 - DNA, 21 bp, synthetic construct
  misc_feature 1..21: note = Synthetic oligonucleotide
  modified_base 2..3: mod_base = OTHER; note = uracil
  modified_base 5..6: mod_base = OTHER; note = uracil
  modified_base 17: mod_base = OTHER; note = uracil
  modified_base 21: mod_base = OTHER; note = uracil
  source 1..21: mol_type = other DNA
tttgttacccccgccatggtt

SEQ ID NO: 129 - DNA, 21 bp, synthetic construct
  misc_feature 1..21: note = Synthetic oligonucleotide
  modified_base 10: mod_base = OTHER; note = uracil
  modified_base 18..19: mod_base = OTHER; note = uracil
  modified_base 21: mod_base = OTHER; note = uracil
  source 1..21: mol_type = other DNA
tccccgccatggagacgtttt

SEQ ID NO: 130 - DNA, 21 bp, synthetic construct
  misc_feature 1..21: note = Synthetic oligonucleotide
  modified_base 10: mod_base = OTHER; note = uracil
  modified_base 18..19: mod_base = OTHER; note = uracil
  modified_base 21: mod_base = OTHER; note = uracil
  source 1..21: mol_type = other DNA
tccccgccatggagacgtttt

SEQ ID NO: 131 - DNA, 21 bp, synthetic construct
  misc_feature 1..21: note = Synthetic oligonucleotide
  modified_base 12: mod_base = OTHER; note = uracil
  modified_base 21: mod_base = OTHER; note = uracil
  source 1..21: mol_type = other DNA
tacccccgccatggagacgtt

SEQ ID NO: 132 - DNA, 21 bp, synthetic construct
  misc_feature 1..21: note = Synthetic oligonucleotide
  modified_base 12: mod_base = OTHER; note = uracil
  modified_base 21: mod_base = OTHER; note = uracil
  source 1..21: mol_type = other DNA
tacccccgccatggagacgtt

SEQ ID NO: 133 - DNA, 21 bp, synthetic construct
  misc_feature 1..21: note = Synthetic oligonucleotide
  modified_base 11: mod_base = OTHER; note = uracil
  modified_base 19: mod_base = OTHER; note = uracil
  modified_base 21: mod_base = OTHER; note = uracil
  source 1..21: mol_type = other DNA
tcccccgccatggagacgttt

SEQ ID NO: 134 - DNA, 21 bp, synthetic construct
  misc_feature 1..21: note = Synthetic oligonucleotide
  modified_base 11: mod_base = OTHER; note = uracil
  modified_base 19: mod_base = OTHER; note = uracil
  modified_base 21: mod_base = OTHER; note = uracil
  source 1..21: mol_type = other DNA
tcccccgccatggagacgttt

SEQ ID NO: 135 - DNA, 21 bp, synthetic construct
  misc_feature 1..21: note = Synthetic oligonucleotide
  modified_base 4: mod_base = OTHER; note = uracil
  modified_base 10: mod_base = OTHER; note = uracil
  modified_base 15..16: mod_base = OTHER; note = uracil
  modified_base 21: mod_base = OTHER; note = uracil
  source 1..21: mol_type = other DNA
tgctcggcctccagttccatt

SEQ ID NO: 136 - DNA, 21 bp, synthetic construct
  misc_feature 1..21: note = Synthetic oligonucleotide
  modified_base 4: mod_base = OTHER; note = uracil
  modified_base 10: mod_base = OTHER; note = uracil
  modified_base 15..16: mod_base = OTHER; note = uracil
  modified_base 21: mod_base = OTHER; note = uracil
  source 1..21: mol_type = other DNA
tgctcggcctccagttccatt

SEQ ID NO: 137 - DNA, 21 bp, synthetic construct
  misc_feature 1..21: note = Synthetic oligonucleotide
  modified_base 8: mod_base = OTHER; note = uracil
  modified_base 10: mod_base = OTHER; note = uracil
  modified_base 15: mod_base = OTHER; note = uracil
  modified_base 21: mod_base = OTHER; note = uracil
  source 1..21: mol_type = other DNA
tggaccctctgcactgggctt

SEQ ID NO: 138 - DNA, 21 bp, synthetic construct
  misc_feature 1..21: note = Synthetic oligonucleotide
  modified_base 8: mod_base = OTHER; note = uracil
  modified_base 10: mod_base = OTHER; note = uracil
  modified_base 15: mod_base = OTHER; note = uracil
  modified_base 21: mod_base = OTHER; note = uracil
  source 1..21: mol_type = other DNA
tggaccctctgcactgggctt

SEQ ID NO: 139 - DNA, 21 bp, synthetic construct
  misc_feature 1..21: note = Synthetic oligonucleotide
  modified_base 7: mod_base = OTHER; note = uracil
  modified_base 9: mod_base = OTHER; note = uracil
  modified_base 14: mod_base = OTHER; note = uracil
  modified_base 19: mod_base = OTHER; note = uracil
  modified_base 21: mod_base = OTHER; note = uracil
  source 1..21: mol_type = other DNA
tgaccctctgcactgggcttt

SEQ ID NO: 140 - DNA, 21 bp, synthetic construct
  misc_feature 1..21: note = Synthetic oligonucleotide
  modified_base 7: mod_base = OTHER; note = uracil
  modified_base 9: mod_base = OTHER; note = uracil
  modified_base 14: mod_base = OTHER; note = uracil
  modified_base 19: mod_base = OTHER; note = uracil
  modified_base 21: mod_base = OTHER; note = uracil
  source 1..21: mol_type = other DNA
tgaccctctgcactgggcttt

SEQ ID NO: 141 - DNA, 21 bp, synthetic construct
  misc_feature 1..21: note = Synthetic oligonucleotide
  modified_base 4: mod_base = OTHER; note = uracil
  modified_base 17: mod_base = OTHER; note = uracil
  modified_base 21: mod_base = OTHER; note = uracil
  source 1..21: mol_type = other DNA
tcatgaagcaggaacatactt

SEQ ID NO: 142 - DNA, 21 bp, synthetic construct
  misc_feature 1..21: note = Synthetic oligonucleotide
  modified_base 5: mod_base = OTHER; note = uracil
  modified_base 18: mod_base = OTHER; note = uracil
  modified_base 21: mod_base = OTHER; note = uracil
  source 1..21: mol_type = other DNA
tgcatgaagcaggaacatatt

SEQ ID NO: 143 - DNA, 21 bp, synthetic construct
  misc_feature 1..21: note = Synthetic oligonucleotide
  modified_base 6: mod_base = OTHER; note = uracil
  modified_base 19: mod_base = OTHER; note = uracil
  modified_base 21: mod_base = OTHER; note = uracil
  source 1..21: mol_type = other DNA
tggcatgaagcaggaacattt

SEQ ID NO: 144 - DNA, 21 bp, synthetic construct
  misc_feature 1..21: note = Synthetic oligonucleotide
  modified_base 7: mod_base = OTHER; note = uracil
  modified_base 21: mod_base = OTHER; note = uracil
  source 1..21: mol_type = other DNA
taggcatgaagcaggaacatt

SEQ ID NO: 145 - DNA, 21 bp, synthetic construct
  misc_feature 1..21: note = Synthetic oligonucleotide
  modified_base 8: mod_base = OTHER; note = uracil
  modified_base 21: mod_base = OTHER; note = uracil
  source 1..21: mol_type = other DNA
taaggcatgaagcaggaactt

SEQ ID NO: 146 - DNA, 21 bp, synthetic construct
  misc_feature 1..21: note = Synthetic oligonucleotide
  modified_base 9: mod_base = OTHER; note = uracil
  modified_base 21: mod_base = OTHER; note = uracil
  source 1..21: mol_type = other DNA
taaaggcatgaagcaggaatt

SEQ ID NO: 147 - DNA, 21 bp, synthetic construct
  misc_feature 1..21: note = Synthetic oligonucleotide
  modified_base 10: mod_base = OTHER; note = uracil
  modified_base 21: mod_base = OTHER; note = uracil
  source 1..21: mol_type = other DNA
tgaaaggcatgaagcaggatt

SEQ ID NO: 148 - DNA, 21 bp, synthetic construct
  misc_feature 1..21: note = Synthetic oligonucleotide
  modified_base 11: mod_base = OTHER; note = uracil
  modified_base 21: mod_base = OTHER; note = uracil
  source 1..21: mol_type = other DNA
tagaaaggcatgaagcaggtt

SEQ ID NO: 149 - DNA, 21 bp, synthetic construct
  misc_feature 1..21: note = Synthetic oligonucleotide
  modified_base 2: mod_base = OTHER; note = uracil
  modified_base 12: mod_base = OTHER; note = uracil
  modified_base 21: mod_base = OTHER; note = uracil
  source 1..21: mol_type = other DNA
ttagaaaggcatgaagcagtt

SEQ ID NO: 150 - DNA, 21 bp, synthetic construct
  misc_feature 1..21: note = Synthetic oligonucleotide
  modified_base 3: mod_base = OTHER; note = uracil
  modified_base 13: mod_base = OTHER; note = uracil
  modified_base 21: mod_base = OTHER; note = uracil
  source 1..21: mol_type = other DNA
tgtagaaaggcatgaagcatt

SEQ ID NO: 151 - DNA, 21 bp, synthetic construct
  misc_feature 1..21: note = Synthetic oligonucleotide
  modified_base 2: mod_base = OTHER; note = uracil
  modified_base 4: mod_base = OTHER; note = uracil
  modified_base 14: mod_base = OTHER; note = uracil
  modified_base 21: mod_base = OTHER; note = uracil
  source 1..21: mol_type = other DNA
ttgtagaaaggcatgaagctt

SEQ ID NO: 152 - DNA, 21 bp, synthetic construct
  misc_feature 1..21: note = Synthetic oligonucleotide
  modified_base 3: mod_base = OTHER; note = uracil
  modified_base 5: mod_base = OTHER; note = uracil
  modified_base 15: mod_base = OTHER; note = uracil
  modified_base 21: mod_base = OTHER; note = uracil
  source 1..21: mol_type = other DNA
tctgtagaaaggcatgaagtt

SEQ ID NO: 153 - DNA, 21 bp, synthetic construct
  misc_feature 1..21: note = Synthetic oligonucleotide
  modified_base 4: mod_base = OTHER; note = uracil
  modified_base 6: mod_base = OTHER; note = uracil
  modified_base 16: mod_base = OTHER; note = uracil
  modified_base 21: mod_base = OTHER; note = uracil
  source 1..21: mol_type = other DNA
tactgtagaaaggcatgaatt

SEQ ID NO: 154 - DNA, 21 bp, synthetic construct
  misc_feature 1..21: note = Synthetic oligonucleotide
  modified_base 5: mod_base = OTHER; note = uracil
  modified_base 7: mod_base = OTHER; note = uracil
  modified_base 17: mod_base = OTHER; note = uracil
  modified_base 21: mod_base = OTHER; note = uracil
  source 1..21: mol_type = other DNA
tcactgtagaaaggcatgatt

SEQ ID NO: 155 - DNA, 21 bp, synthetic construct
  misc_feature 1..21: note = Synthetic oligonucleotide
  modified_base 6: mod_base = OTHER; note = uracil
  modified_base 8: mod_base = OTHER; note = uracil
  modified_base 18: mod_base = OTHER; note = uracil
  modified_base 21: mod_base = OTHER; note = uracil
  source 1..21: mol_type = other DNA
tccactgtagaaaggcatgtt

SEQ ID NO: 156 - DNA, 21 bp, synthetic construct
  misc_feature 1..21: note = Synthetic oligonucleotide
  modified_base 7: mod_base = OTHER; note = uracil
  modified_base 9: mod_base = OTHER; note = uracil
  modified_base 19: mod_base = OTHER; note = uracil
  modified_base 21: mod_base = OTHER; note = uracil
  source 1..21: mol_type = other DNA
tgccactgtagaaaggcattt

SEQ ID NO: 157 - DNA, 21 bp, synthetic construct
  misc_feature 1..21: note = Synthetic oligonucleotide
  modified_base 8: mod_base = OTHER; note = uracil
  modified_base 10: mod_base = OTHER; note = uracil
  modified_base 21: mod_base = OTHER; note = uracil
  source 1..21: mol_type = other DNA
tggccactgtagaaaggcatt

SEQ ID NO: 158 - DNA, 21 bp, synthetic construct
  misc_feature 1..21: note = Synthetic oligonucleotide
  modified_base 9: mod_base = OTHER; note = uracil
  modified_base 11: mod_base = OTHER; note = uracil
  modified_base 21: mod_base = OTHER; note = uracil
  source 1..21: mol_type = other DNA
taggccactgtagaaaggctt

SEQ ID NO: 159 - DNA, 21 bp, synthetic construct
  misc_feature 1..21: note = Synthetic oligonucleotide
  modified_base 10: mod_base = OTHER; note = uracil
  modified_base 12: mod_base = OTHER; note = uracil
  modified_base 21: mod_base = OTHER; note = uracil
  source 1..21: mol_type = other DNA
taaggccactgtagaaaggtt

SEQ ID NO: 160 - DNA, 21 bp, synthetic construct
  misc_feature 1..21: note = Synthetic oligonucleotide
  modified_base 2: mod_base = OTHER; note = uracil
  modified_base 11: mod_base = OTHER; note = uracil
  modified_base 13: mod_base = OTHER; note = uracil
  modified_base 21: mod_base = OTHER; note = uracil
  source 1..21: mol_type = other DNA
ttaaggccactgtagaaagtt

SEQ ID NO: 161 - DNA, 21 bp, synthetic construct
  misc_feature 1..21: note = Synthetic oligonucleotide
  modified_base 3: mod_base = OTHER; note = uracil
  modified_base 12: mod_base = OTHER; note = uracil
  modified_base 14: mod_base = OTHER; note = uracil
  modified_base 21: mod_base = OTHER; note = uracil
  source 1..21: mol_type = other DNA
tataaggccactgtagaaatt

SEQ ID NO: 162 - DNA, 21 bp, synthetic construct
  misc_feature 1..21: note = Synthetic oligonucleotide
  modified_base 4: mod_base = OTHER; note = uracil
  modified_base 17: mod_base = OTHER; note = uracil
  modified_base 21: mod_base = OTHER; note = uracil
  source 1..21: mol_type = other DNA
tcatgaagcaggaacatactt

SEQ ID NO: 163 - DNA, 21 bp, synthetic construct
  misc_feature 1..21: note = Synthetic oligonucleotide
  modified_base 5: mod_base = OTHER; note = uracil
  modified_base 18: mod_base = OTHER; note = uracil
  modified_base 21: mod_base = OTHER; note = uracil
  source 1..21: mol_type = other DNA
tgcatgaagcaggaacatatt

SEQ ID NO: 164 - DNA, 21 bp, synthetic construct
  misc_feature 1..21: note = Synthetic oligonucleotide
  modified_base 6: mod_base = OTHER; note = uracil
  modified_base 19: mod_base = OTHER; note = uracil
  modified_base 21: mod_base = OTHER; note = uracil
  source 1..21: mol_type = other DNA
tggcatgaagcaggaacattt

SEQ ID NO: 165 - DNA, 21 bp, synthetic construct
  misc_feature 1..21: note = Synthetic oligonucleotide
  modified_base 7: mod_base = OTHER; note = uracil
  modified_base 21: mod_base = OTHER; note = uracil
  source 1..21: mol_type = other DNA
taggcatgaagcaggaacatt

SEQ ID NO: 166 - DNA, 21 bp, synthetic construct
  misc_feature 1..21: note = Synthetic oligonucleotide
  modified_base 8: mod_base = OTHER; note = uracil
  modified_base 21: mod_base = OTHER; note = uracil
  source 1..21: mol_type = other DNA
taaggcatgaagcaggaactt

SEQ ID NO: 167 - DNA, 21 bp, synthetic construct
  misc_feature 1..21: note = Synthetic oligonucleotide
  modified_base 9: mod_base = OTHER; note = uracil
  modified_base 21: mod_base = OTHER; note = uracil
  source 1..21: mol_type = other DNA
taaaggcatgaagcaggaatt

SEQ ID NO: 168 - DNA, 21 bp, synthetic construct
  misc_feature 1..21: note = Synthetic oligonucleotide
  modified_base 10: mod_base = OTHER; note = uracil
  modified_base 21: mod_base = OTHER; note = uracil
  source 1..21: mol_type = other DNA
tgaaaggcatgaagcaggatt

SEQ ID NO: 169 - DNA, 21 bp, synthetic construct
  misc_feature 1..21: note = Synthetic oligonucleotide
  modified_base 11: mod_base = OTHER; note = uracil
  modified_base 21: mod_base = OTHER; note = uracil
  source 1..21: mol_type = other DNA
tagaaaggcatgaagcaggtt

SEQ ID NO: 170 - DNA, 21 bp, synthetic construct
  misc_feature 1..21: note = Synthetic oligonucleotide
  modified_base 2: mod_base = OTHER; note = uracil
  modified_base 12: mod_base = OTHER; note = uracil
  modified_base 21: mod_base = OTHER; note = uracil
  source 1..21: mol_type = other DNA
ttagaaaggcatgaagcagtt

SEQ ID NO: 171 - DNA, 21 bp, synthetic construct
  misc_feature 1..21: note = Synthetic oligonucleotide
  modified_base 3: mod_base = OTHER; note = uracil
  modified_base 13: mod_base = OTHER; note = uracil
  modified_base 21: mod_base = OTHER; note = uracil
  source 1..21: mol_type = other DNA
tgtagaaaggcatgaagcatt

SEQ ID NO: 172 - DNA, 21 bp, synthetic construct
  misc_feature 1..21: note = Synthetic oligonucleotide
  modified_base 2: mod_base = OTHER; note = uracil
  modified_base 4: mod_base = OTHER; note = uracil
  modified_base 14: mod_base = OTHER; note = uracil
  modified_base 21: mod_base = OTHER; note = uracil
  source 1..21: mol_type = other DNA
ttgtagaaaggcatgaagctt

SEQ ID NO: 173 - DNA, 21 bp, synthetic construct
  misc_feature 1..21: note = Synthetic oligonucleotide
  modified_base 3: mod_base = OTHER; note = uracil
  modified_base 5: mod_base = OTHER; note = uracil
  modified_base 15: mod_base = OTHER; note = uracil
  modified_base 21: mod_base = OTHER; note = uracil
  source 1..21: mol_type = other DNA
tctgtagaaaggcatgaagtt

SEQ ID NO: 174 - DNA, 21 bp, synthetic construct
  misc_feature 1..21: note = Synthetic oligonucleotide
  modified_base 4: mod_base = OTHER; note = uracil
  modified_base 6: mod_base = OTHER; note = uracil
  modified_base 16: mod_base = OTHER; note = uracil
  modified_base 21: mod_base = OTHER; note = uracil
  source 1..21: mol_type = other DNA
tactgtagaaaggcatgaatt

SEQ ID NO: 175 - DNA, 21 bp, synthetic construct
  misc_feature 1..21: note = Synthetic oligonucleotide
  modified_base 5: mod_base = OTHER; note = uracil
  modified_base 7: mod_base = OTHER; note = uracil
  modified_base 17: mod_base = OTHER; note = uracil
  modified_base 21: mod_base = OTHER; note = uracil
  source 1..21: mol_type = other DNA
tcactgtagaaaggcatgatt

SEQ ID NO: 176 - DNA, 21 bp, synthetic construct
  misc_feature 1..21: note = Synthetic oligonucleotide
  modified_base 6: mod_base = OTHER; note = uracil
  modified_base 8: mod_base = OTHER; note = uracil
  modified_base 18: mod_base = OTHER; note = uracil
  modified_base 21: mod_base = OTHER; note = uracil
  source 1..21: mol_type = other DNA
tccactgtagaaaggcatgtt

SEQ ID NO: 177 - DNA, 21 bp, synthetic construct
  misc_feature 1..21: note = Synthetic oligonucleotide
  modified_base 7: mod_base = OTHER; note = uracil
  modified_base 9: mod_base = OTHER; note = uracil
  modified_base 19: mod_base = OTHER; note = uracil
  modified_base 21: mod_base = OTHER; note = uracil
  source 1..21: mol_type = other DNA
tgccactgtagaaaggcattt

SEQ ID NO: 178 - DNA, 21 bp, synthetic construct
  misc_feature 1..21: note = Synthetic oligonucleotide
  modified_base 8: mod_base = OTHER; note = uracil
  modified_base 10: mod_base = OTHER; note = uracil
  modified_base 21: mod_base = OTHER; note = uracil
  source 1..21: mol_type = other DNA
tggccactgtagaaaggcatt

SEQ ID NO: 179 - DNA, 21 bp, synthetic construct
  misc_feature 1..21: note = Synthetic oligonucleotide
  modified_base 9: mod_base = OTHER; note = uracil
  modified_base 11: mod_base = OTHER; note = uracil
  modified_base 21: mod_base = OTHER; note = uracil
  source 1..21: mol_type = other DNA
taggccactgtagaaaggctt

SEQ ID NO: 180 - DNA, 21 bp, synthetic construct
  misc_feature 1..21: note = Synthetic oligonucleotide
  modified_base 10: mod_base = OTHER; note = uracil
  modified_base 12: mod_base = OTHER; note = uracil
  modified_base 21: mod_base = OTHER; note = uracil
  source 1..21: mol_type = other DNA
taaggccactgtagaaaggtt

SEQ ID NO: 181 - DNA, 21 bp, synthetic construct
  misc_feature 1..21: note = Synthetic oligonucleotide
  modified_base 2: mod_base = OTHER; note = uracil
  modified_base 11: mod_base = OTHER; note = uracil
  modified_base 13: mod_base = OTHER; note = uracil
  modified_base 21: mod_base = OTHER; note = uracil
  source 1..21: mol_type = other DNA
ttaaggccactgtagaaagtt

SEQ ID NO: 182 - DNA, 21 bp, synthetic construct
  misc_feature 1..21: note = Synthetic oligonucleotide
  modified_base 3: mod_base = OTHER; note = uracil
  modified_base 12: mod_base = OTHER; note = uracil
  modified_base 14: mod_base = OTHER; note = uracil
  modified_base 21: mod_base = OTHER; note = uracil
  source 1..21: mol_type = other DNA
tataaggccactgtagaaatt

SEQ ID NO: 183 - DNA, 23 bp, synthetic construct
  misc_feature 1..23: note = Synthetic oligonucleotide
  modified_base 4: mod_base = OTHER; note = uracil
  modified_base 17: mod_base = OTHER; note = uracil
  modified_base 23: mod_base = OTHER; note = uracil
  source 1..23: mol_type = other DNA
tcatgaagcaggaacataccatt

SEQ ID NO: 184 - DNA, 23 bp, synthetic construct
  misc_feature 1..23: note = Synthetic oligonucleotide
  modified_base 5: mod_base = OTHER; note = uracil
  modified_base 18: mod_base = OTHER; note = uracil
  modified_base 23: mod_base = OTHER; note = uracil
  source 1..23: mol_type = other DNA
tgcatgaagcaggaacatacctt

SEQ ID NO: 185 - DNA, 23 bp, synthetic construct
  misc_feature 1..23: note = Synthetic oligonucleotide
  modified_base 6: mod_base = OTHER; note = uracil
  modified_base 19: mod_base = OTHER; note = uracil
  modified_base 23: mod_base = OTHER; note = uracil
  source 1..23: mol_type = other DNA
tggcatgaagcaggaacatactt

SEQ ID NO: 186 - DNA, 23 bp, synthetic construct
  misc_feature 1..23: note = Synthetic oligonucleotide
  modified_base 7: mod_base = OTHER; note = uracil
  modified_base 20: mod_base = OTHER; note = uracil
  modified_base 23: mod_base = OTHER; note = uracil
  source 1..23: mol_type = other DNA
taggcatgaagcaggaacatatt

SEQ ID NO: 187 - DNA, 23 bp, synthetic construct
  misc_feature 1..23: note = Synthetic oligonucleotide
  modified_base 8: mod_base = OTHER; note = uracil
  modified_base 21: mod_base = OTHER; note = uracil
  modified_base 23: mod_base = OTHER; note = uracil
  source 1..23: mol_type = other DNA
taaggcatgaagcaggaacattt

SEQ ID NO: 188 - DNA, 23 bp, synthetic construct
  misc_feature 1..23: note = Synthetic oligonucleotide
  modified_base 9: mod_base = OTHER; note = uracil
  modified_base 23: mod_base = OTHER; note = uracil
  source 1..23: mol_type = other DNA
taaaggcatgaagcaggaacatt

SEQ ID NO: 189 - DNA, 23 bp, synthetic construct
  misc_feature 1..23: note = Synthetic oligonucleotide
  modified_base 10: mod_base = OTHER; note = uracil
  modified_base 23: mod_base = OTHER; note = uracil
  source 1..23: mol_type = other DNA
tgaaaggcatgaagcaggaactt

SEQ ID NO: 190 - DNA, 23 bp, synthetic construct
  misc_feature 1..23: note = Synthetic oligonucleotide
  modified_base 11: mod_base = OTHER; note = uracil
  modified_base 23: mod_base = OTHER; note = uracil
  source 1..23: mol_type = other DNA
tagaaaggcatgaagcaggaatt

SEQ ID NO: 191 - DNA, 23 bp, synthetic construct
  misc_feature 1..23: note = Synthetic oligonucleotide
  modified_base 2: mod_base = OTHER; note = uracil
  modified_base 12: mod_base = OTHER; note = uracil
  modified_base 23: mod_base = OTHER; note = uracil
  source 1..23: mol_type = other DNA
ttagaaaggcatgaagcaggatt

SEQ ID NO: 192 - DNA, 23 bp, synthetic construct
  misc_feature 1..23: note = Synthetic oligonucleotide
  modified_base 3: mod_base = OTHER; note = uracil
  modified_base 13: mod_base = OTHER; note = uracil
  modified_base 23: mod_base = OTHER; note = uracil
  source 1..23: mol_type = other DNA
tgtagaaaggcatgaagcaggtt

SEQ ID NO: 193 - DNA, 23 bp, synthetic construct
  misc_feature 1..23: note = Synthetic oligonucleotide
  modified_base 2: mod_base = OTHER; note = uracil
  modified_base 4: mod_base = OTHER; note = uracil
  modified_base 14: mod_base = OTHER; note = uracil
  modified_base 23: mod_base = OTHER; note = uracil
  source 1..23: mol_type = other DNA
ttgtagaaaggcatgaagcagtt

SEQ ID NO: 194 - DNA, 23 bp, synthetic construct
  misc_feature 1..23: note = Synthetic oligonucleotide
  modified_base 3: mod_base = OTHER; note = uracil
  modified_base 5: mod_base = OTHER; note = uracil
  modified_base 15: mod_base = OTHER; note = uracil
  modified_base 23: mod_base = OTHER; note = uracil
  source 1..23: mol_type = other DNA
tctgtagaaaggcatgaagcatt

SEQ ID NO: 195 - DNA, 23 bp, synthetic construct
  misc_feature 1..23: note = Synthetic oligonucleotide
  modified_base 4: mod_base = OTHER; note = uracil
  modified_base 6: mod_base = OTHER; note = uracil
  modified_base 16: mod_base = OTHER; note = uracil
  modified_base 23: mod_base = OTHER; note = uracil
  source 1..23: mol_type = other DNA
tactgtagaaaggcatgaagctt

SEQ ID NO: 196 - DNA, 23 bp, synthetic construct
  misc_feature 1..23: note = Synthetic oligonucleotide
  modified_base 5: mod_base = OTHER; note = uracil
  modified_base 7: mod_base = OTHER; note = uracil
  modified_base 17: mod_base = OTHER; note = uracil
  modified_base 23: mod_base = OTHER; note = uracil
  source 1..23: mol_type = other DNA
tcactgtagaaaggcatgaagtt

SEQ ID NO: 197 - DNA, 23 bp, synthetic construct
  misc_feature 1..23: note = Synthetic oligonucleotide
  modified_base 6: mod_base = OTHER; note = uracil
  modified_base 8: mod_base = OTHER; note = uracil
  modified_base 18: mod_base = OTHER; note = uracil
  modified_base 23: mod_base = OTHER; note = uracil
  source 1..23: mol_type = other DNA
tccactgtagaaaggcatgaatt

SEQ ID NO: 198 - DNA, 23 bp, synthetic construct
  misc_feature 1..23: note = Synthetic oligonucleotide
  modified_base 7: mod_base = OTHER; note = uracil
  modified_base 9: mod_base = OTHER; note = uracil
  modified_base 19: mod_base = OTHER; note = uracil
  modified_base 23: mod_base = OTHER; note = uracil
  source 1..23: mol_type = other DNA
tgccactgtagaaaggcatgatt

SEQ ID NO: 199 - DNA, 23 bp, synthetic construct
  misc_feature 1..23: note = Synthetic oligonucleotide
  modified_base 8: mod_base = OTHER; note = uracil
  modified_base 10: mod_base = OTHER; note = uracil
  modified_base 20: mod_base = OTHER; note = uracil
  modified_base 23: mod_base = OTHER; note = uracil
  source 1..23: mol_type = other DNA
tggccactgtagaaaggcatgtt

SEQ ID NO: 200 - DNA, 23 bp, synthetic construct
  misc_feature 1..23: note = Synthetic oligonucleotide
  modified_base 9: mod_base = OTHER; note = uracil
  modified_base 11: mod_base = OTHER; note = uracil
  modified_base 21: mod_base = OTHER; note = uracil
  modified_base 23: mod_base = OTHER; note = uracil
  source 1..23: mol_type = other DNA
taggccactgtagaaaggcattt

SEQ ID NO: 201 - DNA, 23 bp, synthetic construct
  misc_feature 1..23: note = Synthetic oligonucleotide
  modified_base 10: mod_base = OTHER; note = uracil
  modified_base 12: mod_base = OTHER; note = uracil
  modified_base 23: mod_base = OTHER; note = uracil
  source 1..23: mol_type = other DNA
taaggccactgtagaaaggcatt

SEQ ID NO: 202 - DNA, 23 bp, synthetic construct
  misc_feature 1..23: note = Synthetic oligonucleotide
  modified_base 2: mod_base = OTHER; note = uracil
  modified_base 11: mod_base = OTHER; note = uracil
  modified_base 13: mod_base = OTHER; note = uracil
  modified_base 23: mod_base = OTHER; note = uracil
  source 1..23: mol_type = other DNA
ttaaggccactgtagaaaggctt

SEQ ID NO: 203 - DNA, 23 bp, synthetic construct
  misc_feature 1..23: note = Synthetic oligonucleotide
  modified_base 3: mod_base = OTHER; note = uracil
  modified_base 12: mod_base = OTHER; note = uracil
  modified_base 14: mod_base = OTHER; note = uracil
  modified_base 23: mod_base = OTHER; note = uracil
  source 1..23: mol_type = other DNA
tataaggccactgtagaaaggtt

SEQ ID NO: 204 - DNA, 23 bp, synthetic construct
  misc_feature 1..23: note = Synthetic oligonucleotide
  modified_base 4: mod_base = OTHER; note = uracil
  modified_base 13: mod_base = OTHER; note = uracil
  modified_base 15: mod_base = OTHER; note = uracil
  modified_base 23: mod_base = OTHER; note = uracil
  source 1..23: mol_type = other DNA
tgataaggccactgtagaaagtt

SEQ ID NO: 205 - DNA, 23 bp, synthetic construct
  misc_feature 1..23: note = Synthetic oligonucleotide
  modified_base 5: mod_base = OTHER; note = uracil
  modified_base 14: mod_base = OTHER; note = uracil
  modified_base 16: mod_base = OTHER; note = uracil
  modified_base 23: mod_base = OTHER; note = uracil
  source 1..23: mol_type = other DNA
tggataaggccactgtagaaatt

SEQ ID NO: 206 - DNA, 23 bp, synthetic construct
  misc_feature 1..23: note = Synthetic oligonucleotide
  modified_base 4: mod_base = OTHER; note = uracil
  modified_base 17: mod_base = OTHER; note = uracil
  modified_base 23: mod_base = OTHER; note = uracil
  source 1..23: mol_type = other DNA
tcatgaagcaggaacataccatt

SEQ ID NO: 207 - DNA, 23 bp, synthetic construct
  misc_feature 1..23: note = Synthetic oligonucleotide
  modified_base 5: mod_base = OTHER; note = uracil
  modified_base 18: mod_base = OTHER; note = uracil
  modified_base 23: mod_base = OTHER; note = uracil
  source 1..23: mol_type = other DNA
tgcatgaagcaggaacatacctt

SEQ ID NO: 208 - DNA, 23 bp, synthetic construct
  misc_feature 1..23: note = Synthetic oligonucleotide
  modified_base 6: mod_base = OTHER; note = uracil
  modified_base 19: mod_base = OTHER; note = uracil
  modified_base 23: mod_base = OTHER; note = uracil
  source 1..23: mol_type = other DNA
tggcatgaagcaggaacatactt

SEQ ID NO: 209 - DNA, 23 bp, synthetic construct
  misc_feature 1..23: note = Synthetic oligonucleotide
  modified_base 7: mod_base = OTHER; note = uracil
  modified_base 20: mod_base = OTHER; note = uracil
  modified_base 23: mod_base = OTHER; note = uracil
  source 1..23: mol_type = other DNA
taggcatgaagcaggaacatatt

SEQ ID NO: 210 - DNA, 23 bp, synthetic construct
  misc_feature 1..23: note = Synthetic oligonucleotide
  modified_base 8: mod_base = OTHER; note = uracil
  modified_base 21: mod_base = OTHER; note = uracil
  modified_base 23: mod_base = OTHER; note = uracil
  source 1..23: mol_type = other DNA
taaggcatgaagcaggaacattt

SEQ ID NO: 211 - DNA, 23 bp, synthetic construct
  misc_feature 1..23: note = Synthetic oligonucleotide
  modified_base 9: mod_base = OTHER; note = uracil
  modified_base 23: mod_base = OTHER; note = uracil
  source 1..23: mol_type = other DNA
taaaggcatgaagcaggaacatt

SEQ ID NO: 212 - DNA, 23 bp, synthetic construct
  misc_feature 1..23: note = Synthetic oligonucleotide
  modified_base 10: mod_base = OTHER; note = uracil
  modified_base 23: mod_base = OTHER; note = uracil
  source 1..23: mol_type = other DNA
tgaaaggcatgaagcaggaactt

SEQ ID NO: 213 - DNA, 23 bp, synthetic construct
  misc_feature 1..23: note = Synthetic oligonucleotide
  modified_base 11: mod_base = OTHER; note = uracil
  modified_base 23: mod_base = OTHER; note = uracil
  source 1..23: mol_type = other DNA
tagaaaggcatgaagcaggaatt

SEQ ID NO: 214 - DNA, 23 bp, synthetic construct
  misc_feature 1..23: note = Synthetic oligonucleotide
  modified_base 2: mod_base = OTHER; note = uracil
  modified_base 12: mod_base = OTHER; note = uracil
  modified_base 23: mod_base = OTHER; note = uracil
  source 1..23: mol_type = other DNA
ttagaaaggcatgaagcaggatt

SEQ ID NO: 215 - DNA, 23 bp, synthetic construct
  misc_feature 1..23: note = Synthetic oligonucleotide
  modified_base 3: mod_base = OTHER; note = uracil
  modified_base 13: mod_base = OTHER; note = uracil
  modified_base 23: mod_base = OTHER; note = uracil
  source 1..23: mol_type = other DNA
tgtagaaaggcatgaagcaggtt

SEQ ID NO: 216 - DNA, 23 bp, synthetic construct
  misc_feature 1..23: note = Synthetic oligonucleotide
  modified_base 2: mod_base = OTHER; note = uracil
  modified_base 4: mod_base = OTHER; note = uracil
  modified_base 14: mod_base = OTHER; note = uracil
  modified_base 23: mod_base = OTHER; note = uracil
  source 1..23: mol_type = other DNA
ttgtagaaaggcatgaagcagtt

SEQ ID NO: 217 - DNA, 23 bp, synthetic construct
  misc_feature 1..23: note = Synthetic oligonucleotide
  modified_base 3: mod_base = OTHER; note = uracil
  modified_base 5: mod_base = OTHER; note = uracil
  modified_base 15: mod_base = OTHER; note = uracil
  modified_base 23: mod_base = OTHER; note = uracil
  source 1..23: mol_type = other DNA
tctgtagaaaggcatgaagcatt

SEQ ID NO: 218 - DNA, 23 bp, synthetic construct
  misc_feature 1..23: note = Synthetic oligonucleotide
  modified_base 4: mod_base = OTHER; note = uracil
  modified_base 6: mod_base = OTHER; note = uracil
  modified_base 16: mod_base = OTHER; note = uracil
  modified_base 23: mod_base = OTHER; note = uracil
  source 1..23: mol_type = other DNA
tactgtagaaaggcatgaagctt

SEQ ID NO: 219 - DNA, 23 bp, synthetic construct
  misc_feature 1..23: note = Synthetic oligonucleotide
  modified_base 5: mod_base = OTHER; note = uracil
  modified_base 7: mod_base = OTHER; note = uracil
  modified_base 17: mod_base = OTHER; note = uracil
  modified_base 23: mod_base = OTHER; note = uracil
  source 1..23: mol_type = other DNA
tcactgtagaaaggcatgaagtt

SEQ ID NO: 220 - DNA, 23 bp, synthetic construct
  misc_feature 1..23: note = Synthetic oligonucleotide
  modified_base 6: mod_base = OTHER; note = uracil
  modified_base 8: mod_base = OTHER; note = uracil
  modified_base 18: mod_base = OTHER; note = uracil
  modified_base 23: mod_base = OTHER; note = uracil
  source 1..23: mol_type = other DNA
tccactgtagaaaggcatgaatt

SEQ ID NO: 221 - DNA, 23 bp, synthetic construct
  misc_feature 1..23: note = Synthetic oligonucleotide
  modified_base 7: mod_base = OTHER; note = uracil
  modified_base 9: mod_base = OTHER; note = uracil
  modified_base 19: mod_base = OTHER; note = uracil
  modified_base 23: mod_base = OTHER; note = uracil
  source 1..23: mol_type = other DNA
tgccactgtagaaaggcatgatt

SEQ ID NO: 222 - DNA, 23 bp, synthetic construct
  misc_feature 1..23: note = Synthetic oligonucleotide
  modified_base 8: mod_base = OTHER; note = uracil
  modified_base 10: mod_base = OTHER; note = uracil
  modified_base 20: mod_base = OTHER; note = uracil
  modified_base 23: mod_base = OTHER; note = uracil
  source 1..23: mol_type = other DNA
tggccactgtagaaaggcatgtt

SEQ ID NO: 223 - DNA, 23 bp, synthetic construct
  misc_feature 1..23: note = Synthetic oligonucleotide
  modified_base 9: mod_base = OTHER; note = uracil
  modified_base 11: mod_base = OTHER; note = uracil
  modified_base 21: mod_base = OTHER; note = uracil
  modified_base 23: mod_base = OTHER; note = uracil
  source 1..23: mol_type = other DNA
taggccactgtagaaaggcattt

SEQ ID NO: 224 - DNA, 23 bp, synthetic construct
  misc_feature 1..23: note = Synthetic oligonucleotide
  modified_base 10: mod_base = OTHER; note = uracil
  modified_base 12: mod_base = OTHER; note = uracil
  modified_base 23: mod_base = OTHER; note = uracil
  source 1..23: mol_type = other DNA
taaggccactgtagaaaggcatt

SEQ ID NO: 225 - DNA, 23 bp, synthetic construct
  misc_feature 1..23: note = Synthetic oligonucleotide
  modified_base 2: mod_base = OTHER; note = uracil
  modified_base 11: mod_base = OTHER; note = uracil
  modified_base 13: mod_base = OTHER; note = uracil
  modified_base 23: mod_base = OTHER; note = uracil
  source 1..23: mol_type = other DNA
ttaaggccactgtagaaaggctt

SEQ ID NO: 226 - DNA, 23 bp, synthetic construct
  misc_feature 1..23: note = Synthetic oligonucleotide
  modified_base 3: mod_base = OTHER; note = uracil
  modified_base 12: mod_base = OTHER; note = uracil
  modified_base 14: mod_base = OTHER; note = uracil
  modified_base 23: mod_base = OTHER; note = uracil
  source 1..23: mol_type = other DNA
tataaggccactgtagaaaggtt

SEQ ID NO: 227 - DNA, 23 bp, synthetic construct
  misc_feature 1..23: note = Synthetic oligonucleotide
  modified_base 4: mod_base = OTHER; note = uracil
  modified_base 13: mod_base = OTHER; note = uracil
  modified_base 15: mod_base = OTHER; note = uracil
  modified_base 23: mod_base = OTHER; note = uracil
  source 1..23: mol_type = other DNA
tgataaggccactgtagaaagtt

SEQ ID NO: 228 - DNA, 23 bp, synthetic construct
  misc_feature 1..23: note = Synthetic oligonucleotide
  modified_base 5: mod_base = OTHER; note = uracil
  modified_base 14: mod_base = OTHER; note = uracil
  modified_base 16: mod_base = OTHER; note = uracil
  modified_base 23: mod_base = OTHER; note = uracil
  source 1..23: mol_type = other DNA
tggataaggccactgtagaaatt

SEQ ID NO: 229 - DNA, 23 bp, synthetic construct
  misc_feature 1..23: note = Synthetic oligonucleotide
  modified_base 7: mod_base = OTHER; note = uracil
  modified_base 9: mod_base = OTHER; note = uracil
  modified_base 19: mod_base = OTHER; note = uracil
  modified_base 23: mod_base = OTHER; note = uracil
  source 1..23: mol_type = other DNA
tgccactgtagaaaggcatgatt

SEQ ID NO: 230 - DNA, 23 bp, synthetic construct
  misc_feature 1..23: note = Synthetic oligonucleotide
  modified_base 7: mod_base = OTHER; note = uracil
  modified_base 9: mod_base = OTHER; note = uracil
  modified_base 19: mod_base = OTHER; note = uracil
  modified_base 23: mod_base = OTHER; note = uracil
  source 1..23: mol_type = other DNA
tgccactgtagaaaggcatgatt

SEQ ID NO: 231 - DNA, 23 bp, synthetic construct
  misc_feature 1..23: note = Synthetic oligonucleotide
  modified_base 7: mod_base = OTHER; note = uracil
  modified_base 9: mod_base = OTHER; note = uracil
  modified_base 19: mod_base = OTHER; note = uracil
  modified_base 23: mod_base = OTHER; note = uracil
  source 1..23: mol_type = other DNA
tgccactgtagaaaggcatgatt

SEQ ID NO: 232 - DNA, 23 bp, synthetic construct
  misc_feature 1..23: note = Synthetic oligonucleotide
  modified_base 7: mod_base = OTHER; note = uracil
  modified_base 9: mod_base = OTHER; note = uracil
  modified_base 19: mod_base = OTHER; note = uracil
  modified_base 23: mod_base = OTHER; note = uracil
  source 1..23: mol_type = other DNA
tgccactgtagaaaggcatgatt

SEQ ID NO: 233 - DNA, 23 bp, synthetic construct
  misc_feature 1..23: note = Synthetic oligonucleotide
  modified_base 7: mod_base = OTHER; note = uracil
  modified_base 9: mod_base = OTHER; note = uracil
  modified_base 19: mod_base = OTHER; note = uracil
  modified_base 23: mod_base = OTHER; note = uracil
  source 1..23: mol_type = other DNA
tgccactgtagaaaggcatgatt

SEQ ID NO: 234 - DNA, 23 bp, synthetic construct
  misc_feature 1..23: note = Synthetic oligonucleotide
  modified_base 7: mod_base = OTHER; note = uracil
  modified_base 9: mod_base = OTHER; note = uracil
  modified_base 19: mod_base = OTHER; note = uracil
  modified_base 23: mod_base = OTHER; note = uracil
  source 1..23: mol_type = other DNA
tgccactgtagaaaggcatgatt

SEQ ID NO: 235 - DNA, 23 bp, synthetic construct
  misc_feature 1..23: note = Synthetic oligonucleotide
  modified_base 7: mod_base = OTHER; note = uracil
  modified_base 9: mod_base = OTHER; note = uracil
  modified_base 19: mod_base = OTHER; note = uracil
  modified_base 23: mod_base = OTHER; note = uracil
  source 1..23: mol_type = other DNA
tgccactgtagaaaggcatgatt

SEQ ID NO: 236 - DNA, 23 bp, synthetic construct
  misc_feature 1..23: note = Synthetic oligonucleotide
  modified_base 7: mod_base = OTHER; note = uracil
  modified_base 9: mod_base = OTHER; note = uracil
  modified_base 19: mod_base = OTHER; note = uracil
  modified_base 23: mod_base = OTHER; note = uracil
  source 1..23: mol_type = other DNA
tgccactgtagaaaggcatgatt

SEQ ID NO: 237 - DNA, 23 bp, synthetic construct
  misc_feature 1..23: note = Synthetic oligonucleotide
  modified_base 7: mod_base = OTHER; note = uracil
  modified_base 9: mod_base = OTHER; note = uracil
  modified_base 19: mod_base = OTHER; note = uracil
  modified_base 23: mod_base = OTHER; note = uracil
  source 1..23: mol_type = other DNA
tgccactgtagaaaggcatgatt

SEQ ID NO: 238 - DNA, 23 bp, synthetic construct
  misc_feature 1..23: note = Synthetic oligonucleotide
  modified_base 7: mod_base = OTHER; note = uracil
  modified_base 9: mod_base = OTHER; note = uracil
  modified_base 19: mod_base = OTHER; note = uracil
  modified_base 23: mod_base = OTHER; note = uracil
  source 1..23: mol_type = other DNA
tgccactgtagaaaggcatgatt

SEQ ID NO: 239 - DNA, 21 bp, synthetic construct
  misc_feature 1..21: note = Synthetic oligonucleotide
  modified_base 7: mod_base = OTHER; note = uracil
  modified_base 9: mod_base = OTHER; note = uracil
  modified_base 19: mod_base = OTHER; note = uracil
  modified_base 21: mod_base = OTHER; note = uracil
  source 1..21: mol_type = other DNA
tgccactgtagaaaggcattt

SEQ ID NO: 240 - DNA, 21 bp, synthetic construct
  misc_feature 1..21: note = Synthetic oligonucleotide
  modified_base 7: mod_base = OTHER; note = uracil
  modified_base 9: mod_base = OTHER; note = uracil
  modified_base 19: mod_base = OTHER; note = uracil
  modified_base 21: mod_base = OTHER; note = uracil
  source 1..21: mol_type = other DNA
tgccactgtagaaaggcattt

SEQ ID NO: 241 - DNA, 21 bp, synthetic construct
  misc_feature 1..21: note = Synthetic oligonucleotide
  modified_base 7: mod_base = OTHER; note = uracil
  modified_base 9: mod_base = OTHER; note = uracil
  modified_base 19: mod_base = OTHER; note = uracil
  modified_base 21: mod_base = OTHER; note = uracil
  source 1..21: mol_type = other DNA
tgccactgtagaaaggcattt

SEQ ID NO: 242 - DNA, 21 bp, synthetic construct
  misc_feature 1..21: note = Synthetic oligonucleotide
  modified_base 7: mod_base = OTHER; note = uracil
  modified_base 9: mod_base = OTHER; note = uracil
  modified_base 19: mod_base = OTHER; note = uracil
  modified_base 21: mod_base = OTHER; note = uracil
  source 1..21: mol_type = other DNA
tgccactgtagaaaggcattt

SEQ ID NO: 243 - DNA, 21 bp, synthetic construct
  misc_feature 1..21: note = Synthetic oligonucleotide
  modified_base 7: mod_base = OTHER; note = uracil
  modified_base 9: mod_base = OTHER; note = uracil
  modified_base 19: mod_base = OTHER; note = uracil
  modified_base 21: mod_base = OTHER; note = uracil
  source 1..21: mol_type = other DNA
tgccactgtagaaaggcattt

SEQ ID NO: 244 - DNA, 21 bp, synthetic construct
  misc_feature 1..21: note = Synthetic oligonucleotide
  modified_base 7: mod_base = OTHER; note = uracil
  modified_base 9: mod_base = OTHER; note = uracil
  modified_base 19: mod_base = OTHER; note = uracil
  modified_base 21: mod_base = OTHER; note = uracil
  source 1..21: mol_type = other DNA
tgccactgtagaaaggcattt

SEQ ID NO: 245 - DNA, 21 bp, synthetic construct
  misc_feature 1..21: note = Synthetic oligonucleotide
  modified_base 7: mod_base = OTHER; note = uracil
  modified_base 9: mod_base = OTHER; note = uracil
  modified_base 19: mod_base = OTHER; note = uracil
  modified_base 21: mod_base = OTHER; note = uracil
  source 1..21: mol_type = other DNA
tgccactgtagaaaggcattt

SEQ ID NO: 246 - DNA, 21 bp, synthetic construct
  misc_feature 1..21: note = Synthetic oligonucleotide
  modified_base 7: mod_base = OTHER; note = uracil
  modified_base 9: mod_base = OTHER; note = uracil
  modified_base 19: mod_base = OTHER; note = uracil
  modified_base 21: mod_base = OTHER; note = uracil
  source 1..21: mol_type = other DNA
tgccactgtagaaaggcattt

SEQ ID NO: 247 - DNA, 21 bp, synthetic construct
  misc_feature 1..21: note = Synthetic oligonucleotide
  modified_base 7: mod_base = OTHER; note = uracil
  modified_base 9: mod_base = OTHER; note = uracil
  modified_base 19: mod_base = OTHER; note = uracil
  modified_base 21: mod_base = OTHER; note = uracil
  source 1..21: mol_type = other DNA
tgccactgtagaaaggcattt

SEQ ID NO: 248 - DNA, 21 bp, synthetic construct
  misc_feature 1..21: note = Synthetic oligonucleotide
  modified_base 7: mod_base = OTHER; note = uracil
  modified_base 9: mod_base = OTHER; note = uracil
  modified_base 19: mod_base = OTHER; note = uracil
  modified_base 21: mod_base = OTHER; note = uracil
  source 1..21: mol_type = other DNA
tgccactgtagaaaggcattt

SEQ ID NO: 249 - DNA, 21 bp, synthetic construct
  misc_feature 1..21: note = Synthetic oligonucleotide
  modified_base 7: mod_base = OTHER; note = uracil
  modified_base 21: mod_base = OTHER; note = uracil
  source 1..21: mol_type = other DNA
taggcatgaagcaggaacatt

SEQ ID NO: 250 - DNA, 23 bp, synthetic construct
  misc_feature 1..23: note = Synthetic oligonucleotide
  modified_base 7: mod_base = OTHER; note = uracil
  modified_base 20: mod_base = OTHER; note = uracil
  modified_base 23: mod_base = OTHER; note = uracil
  source 1..23: mol_type = other DNA
taggcatgaagcaggaacatatt

SEQ ID NO: 251 - DNA, 23 bp, synthetic construct
  misc_feature 1..23: note = Synthetic oligonucleotide
  modified_base 4: mod_base = OTHER; note = uracil
  modified_base 10: mod_base = OTHER; note = uracil
  modified_base 23: mod_base = OTHER; note = uracil
  source 1..23: mol_type = other DNA
tcctgaggatggaccgcggggtt

SEQ ID NO: 252 - DNA, 23 bp, synthetic construct
  misc_feature 1..23: note = Synthetic oligonucleotide
  modified_base 3: mod_base = OTHER; note = uracil
  modified_base 6..7: mod_base = OTHER; note = uracil
  modified_base 11: mod_base = OTHER; note = uracil
  modified_base 14: mod_base = OTHER; note = uracil
  modified_base 18: mod_base = OTHER; note = uracil
  modified_base 23: mod_base = OTHER; note = uracil
  source 1..23: mol_type = other DNA
tgtgcttggctcctgcctgggtt

SEQ ID NO: 253 - DNA, 23 bp, synthetic construct
  misc_feature 1..23: note = Synthetic oligonucleotide
  modified_base 3..4: mod_base = OTHER; note = uracil
  modified_base 6..7: mod_base = OTHER; note = uracil
  modified_base 18: mod_base = OTHER; note = uracil
  modified_base 23: mod_base = OTHER; note = uracil
  source 1..23: mol_type = other DNA
tcttgttacccccgccatggatt

SEQ ID NO: 254 - DNA, 23 bp, synthetic construct
  misc_feature 1..23: note = Synthetic oligonucleotide
  modified_base 2: mod_base = OTHER; note = uracil
  modified_base 13: mod_base = OTHER; note = uracil
  modified_base 21: mod_base = OTHER; note = uracil
  modified_base 23: mod_base = OTHER; note = uracil
  source 1..23: mol_type = other DNA
ttacccccgccatggagacgttt

SEQ ID NO: 255 - DNA, 23 bp, synthetic construct
  misc_feature 1..23: note = Synthetic oligonucleotide
  modified_base 11: mod_base = OTHER; note = uracil
  modified_base 19..21: mod_base = OTHER; note = uracil
  modified_base 23: mod_base = OTHER; note = uracil
  source 1..23: mol_type = other DNA
tcccccgccatggagacgttttt

SEQ ID NO: 256 - DNA, 23 bp, synthetic construct
  misc_feature 1..23: note = Synthetic oligonucleotide
  modified_base 5: mod_base = OTHER; note = uracil
  modified_base 11: mod_base = OTHER; note = uracil
  modified_base 23: mod_base = OTHER; note = uracil
  source 1..23: mol_type = other DNA
tacctgaggatggaccgcgggtt

SEQ ID NO: 257 - DNA, 23 bp, synthetic construct
  misc_feature 1..23: note = Synthetic oligonucleotide
  modified_base 6: mod_base = OTHER; note = uracil
  modified_base 12: mod_base = OTHER; note = uracil
  modified_base 23: mod_base = OTHER; note = uracil
  source 1..23: mol_type = other DNA
tgacctgaggatggaccgcggtt

SEQ ID NO: 258 - DNA, 23 bp, synthetic construct
  misc_feature 1..23: note = Synthetic oligonucleotide
  modified_base 12: mod_base = OTHER; note = uracil
  modified_base 20..21: mod_base = OTHER; note = uracil
  modified_base 23: mod_base = OTHER; note = uracil
  source 1..23: mol_type = other DNA
tacccccgccatggagacgtttt

SEQ ID NO: 259 - DNA, 23 bp, synthetic construct
  misc_feature 1..23: note = Synthetic oligonucleotide
  modified_base 8: mod_base = OTHER; note = uracil
  modified_base 10: mod_base = OTHER; note = uracil
  modified_base 15: mod_base = OTHER; note = uracil
  modified_base 20..21: mod_base = OTHER; note = uracil
  modified_base 23: mod_base = OTHER; note = uracil
  source 1..23: mol_type = other DNA
tggaccctctgcactgggctttt

SEQ ID NO: 260 - DNA, 23 bp, synthetic construct
  misc_feature 1..23: note = Synthetic oligonucleotide
  modified_base 3: mod_base = OTHER; note = uracil
  modified_base 6: mod_base = OTHER; note = uracil
  modified_base 16..17: mod_base = OTHER; note = uracil
  modified_base 23: mod_base = OTHER; note = uracil
  source 1..23: mol_type = other DNA
tctgctggacagcccttggggtt

SEQ ID NO: 261 - DNA, 23 bp, synthetic construct
  misc_feature 1..23: note = Synthetic oligonucleotide
  modified_base 2: mod_base = OTHER; note = uracil
  modified_base 7: mod_base = OTHER; note = uracil
  modified_base 12..13: mod_base = OTHER; note = uracil
  modified_base 16: mod_base = OTHER; note = uracil
  modified_base 19: mod_base = OTHER; note = uracil
  modified_base 21: mod_base = OTHER; note = uracil
  modified_base 23: mod_base = OTHER; note = uracil
  source 1..23: mol_type = other DNA
ttgcactgggcttcctggtgttt

SEQ ID NO: 262 - DNA, 23 bp, synthetic construct
  misc_feature 1..23: note = Synthetic oligonucleotide
  modified_base 7: mod_base = OTHER; note = uracil
  modified_base 13: mod_base = OTHER; note = uracil
  modified_base 23: mod_base = OTHER; note = uracil
  source 1..23: mol_type = other DNA
tggacctgaggatggaccgcgtt

SEQ ID NO: 263 - DNA, 23 bp, synthetic construct
  misc_feature 1..23: note = Synthetic oligonucleotide
  modified_base 9: mod_base = OTHER; note = uracil
  modified_base 11: mod_base = OTHER; note = uracil
  modified_base 16: mod_base = OTHER; note = uracil
  modified_base 21: mod_base = OTHER; note = uracil
  modified_base 23: mod_base = OTHER; note = uracil
  source 1..23: mol_type = other DNA
tgggaccctctgcactgggcttt

SEQ ID NO: 264 - DNA, 23 bp, synthetic construct
  misc_feature 1..23: note = Synthetic oligonucleotide
  modified_base 2..3: mod_base = OTHER; note = uracil
  modified_base 5..6: mod_base = OTHER; note = uracil
  modified_base 17: mod_base = OTHER; note = uracil
  modified_base 23: mod_base = OTHER; note = uracil
  source 1..23: mol_type = other DNA
tttgttacccccgccatggagtt

SEQ ID NO: 265 - DNA, 23 bp, synthetic construct
  misc_feature 1..23: note = Synthetic oligonucleotide
  modified_base 4: mod_base = OTHER; note = uracil
  modified_base 6: mod_base = OTHER; note = uracil
  modified_base 11: mod_base = OTHER; note = uracil
  modified_base 19: mod_base = OTHER; note = uracil
  modified_base 23: mod_base = OTHER; note = uracil
  source 1..23: mol_type = other DNA
tcctgtgaggtcacccactgctt

SEQ ID NO: 266 - DNA, 23 bp, synthetic construct
  misc_feature 1..23: note = Synthetic oligonucleotide
  modified_base 2: mod_base = OTHER; note = uracil
  modified_base 4: mod_base = OTHER; note = uracil
  modified_base 7: mod_base = OTHER; note = uracil
  modified_base 17..18: mod_base = OTHER; note = uracil
  modified_base 23: mod_base = OTHER; note = uracil
  source 1..23: mol_type = other DNA
ttctgctggacagcccttgggtt

SEQ ID NO: 267 - DNA, 23 bp, synthetic construct
  misc_feature 1..23: note = Synthetic oligonucleotide
  modified_base 2: mod_base = OTHER; note = uracil
  modified_base 5: mod_base = OTHER; note = uracil
  modified_base 15: mod_base = OTHER; note = uracil
  modified_base 23: mod_base = OTHER; note = uracil
  source 1..23: mol_type = other DNA
ttgctccagcgggataccggatt

SEQ ID NO: 268 - DNA, 23 bp, synthetic construct
  misc_feature 1..23: note = Synthetic oligonucleotide
  modified_base 5: mod_base = OTHER; note = uracil
  modified_base 10: mod_base = OTHER; note = uracil
  modified_base 13: mod_base = OTHER; note = uracil
  modified_base 19: mod_base = OTHER; note = uracil
  modified_base 23: mod_base = OTHER; note = uracil
  source 1..23: mol_type = other DNA
tggctgggatcctccacgtcatt

SEQ ID NO: 269 - DNA, 23 bp, synthetic construct
  misc_feature 1..23: note = Synthetic oligonucleotide
  modified_base 2: mod_base = OTHER; note = uracil
  modified_base 4..5: mod_base = OTHER; note = uracil
  modified_base 7..8: mod_base = OTHER; note = uracil
  modified_base 19: mod_base = OTHER; note = uracil
  modified_base 23: mod_base = OTHER; note = uracil
  source 1..23: mol_type = other DNA
ttcttgttacccccgccatggtt

SEQ ID NO: 270 - DNA, 23 bp, synthetic construct
  misc_feature 1..23: note = Synthetic oligonucleotide
  modified_base 10: mod_base = OTHER; note = uracil
  modified_base 12: mod_base = OTHER; note = uracil
  modified_base 17: mod_base = OTHER; note = uracil
  modified_base 23: mod_base = OTHER; note = uracil
  source 1..23: mol_type = other DNA
tagggaccctctgcactgggctt

SEQ ID NO: 271 - DNA, 23 bp, synthetic construct
  misc_feature 1..23: note = Synthetic oligonucleotide
  modified_base 3: mod_base = OTHER; note = uracil
  modified_base 5..6: mod_base = OTHER; note = uracil
  modified_base 10: mod_base = OTHER; note = uracil
  modified_base 13: mod_base = OTHER; note = uracil
  modified_base 17: mod_base = OTHER; note = uracil
  modified_base 23: mod_base = OTHER; note = uracil
  source 1..23: mol_type = other DNA
tctgttggctgctcactggcatt

SEQ ID NO: 272 - DNA, 23 bp, synthetic construct
  misc_feature 1..23: note = Synthetic oligonucleotide
  modified_base 4: mod_base = OTHER; note = uracil
  modified_base 10: mod_base = OTHER; note = uracil
  modified_base 23: mod_base = OTHER; note = uracil
  source 1..23: mol_type = other DNA
tcctgaggatggaccgcggggtt

SEQ ID NO: 273 - DNA, 23 bp, synthetic construct
  misc_feature 1..23: note = Synthetic oligonucleotide
  modified_base 3: mod_base = OTHER; note = uracil
  modified_base 6..7: mod_base = OTHER; note = uracil
  modified_base 11: mod_base = OTHER; note = uracil
  modified_base 14: mod_base = OTHER; note = uracil
  modified_base 18: mod_base = OTHER; note = uracil
  modified_base 23: mod_base = OTHER; note = uracil
  source 1..23: mol_type = other DNA
tgtgcttggctcctgcctgggtt

SEQ ID NO: 274 - DNA, 23 bp, synthetic construct
  misc_feature 1..23: note = Synthetic oligonucleotide
  modified_base 3..4: mod_base = OTHER; note = uracil
  modified_base 6..7: mod_base = OTHER; note = uracil
  modified_base 18: mod_base = OTHER; note = uracil
  modified_base 23: mod_base = OTHER; note = uracil
  source 1..23: mol_type = other DNA
tcttgttacccccgccatggatt

SEQ ID NO: 275 - DNA, 23 bp, synthetic construct
  misc_feature 1..23: note = Synthetic oligonucleotide
  modified_base 2: mod_base = OTHER; note = uracil
  modified_base 13: mod_base = OTHER; note = uracil
  modified_base 21: mod_base = OTHER; note = uracil
  modified_base 23: mod_base = OTHER; note = uracil
  source 1..23: mol_type = other DNA
ttacccccgccatggagacgttt

SEQ ID NO: 276 - DNA, 23 bp, synthetic construct
  misc_feature 1..23: note = Synthetic oligonucleotide
  modified_base 11: mod_base = OTHER; note = uracil
  modified_base 19..21: mod_base = OTHER; note = uracil
  modified_base 23: mod_base = OTHER; note = uracil
  source 1..23: mol_type = other DNA
tcccccgccatggagacgttttt

SEQ ID NO: 277 - DNA, 23 bp, synthetic construct
  misc_feature 1..23: note = Synthetic oligonucleotide
  modified_base 5: mod_base = OTHER; note = uracil
  modified_base 11: mod_base = OTHER; note = uracil
  modified_base 23: mod_base = OTHER; note = uracil
  source 1..23: mol_type = other DNA
tacctgaggatggaccgcgggtt

SEQ ID NO: 278 - DNA, 23 bp, synthetic construct
  misc_feature 1..23: note = Synthetic oligonucleotide
  modified_base 6: mod_base = OTHER; note = uracil
  modified_base 12: mod_base = OTHER; note = uracil
  modified_base 23: mod_base = OTHER; note = uracil
  source 1..23: mol_type = other DNA
tgacctgaggatggaccgcggtt

SEQ ID NO: 279 - DNA, 23 bp, synthetic construct
  misc_feature 1..23: note = Synthetic oligonucleotide
  modified_base 12: mod_base = OTHER; note = uracil
  modified_base 20..21: mod_base = OTHER; note = uracil
  modified_base 23: mod_base = OTHER; note = uracil
  source 1..23: mol_type = other DNA
tacccccgccatggagacgtttt

SEQ ID NO: 280 - DNA, 23 bp, synthetic construct
  misc_feature 1..23: note = Synthetic oligonucleotide
  modified_base 8: mod_base = OTHER; note = uracil
  modified_base 10: mod_base = OTHER; note = uracil
  modified_base 15: mod_base = OTHER; note = uracil
  modified_base 20..21: mod_base = OTHER; note = uracil
  modified_base 23: mod_base = OTHER; note = uracil
  source 1..23: mol_type = other DNA
tggaccctctgcactgggctttt

SEQ ID NO: 281 - DNA, 23 bp, synthetic construct
  misc_feature 1..23: note = Synthetic oligonucleotide
  modified_base 3: mod_base = OTHER; note = uracil
  modified_base 6: mod_base = OTHER; note = uracil
  modified_base 16..17: mod_base = OTHER; note = uracil
  modified_base 23: mod_base = OTHER; note = uracil
  source 1..23: mol_type = other DNA
tctgctggacagcccttggggtt

SEQ ID NO: 282 - DNA, 23 bp, synthetic construct
  misc_feature 1..23: note = Synthetic oligonucleotide
  modified_base 2: mod_base = OTHER; note = uracil
  modified_base 7: mod_base = OTHER; note = uracil
  modified_base 12..13: mod_base = OTHER; note = uracil
  modified_base 16: mod_base = OTHER; note = uracil
  modified_base 19: mod_base = OTHER; note = uracil
  modified_base 21: mod_base = OTHER; note = uracil
  modified_base 23: mod_base = OTHER; note = uracil
  source 1..23: mol_type = other DNA
ttgcactgggcttcctggtgttt

SEQ ID NO: 283 - DNA, 23 bp, synthetic construct
  misc_feature 1..23: note = Synthetic oligonucleotide
  modified_base 7: mod_base = OTHER; note = uracil
  modified_base 13: mod_base = OTHER; note = uracil
  modified_base 23: mod_base = OTHER; note = uracil
  source 1..23: mol_type = other DNA
tggacctgaggatggaccgcgtt

SEQ ID NO: 284 - DNA, 23 bp, synthetic construct
  misc_feature 1..23: note = Synthetic oligonucleotide
  modified_base 9: mod_base = OTHER; note = uracil
  modified_base 11: mod_base = OTHER; note = uracil
  modified_base 16: mod_base = OTHER; note = uracil
  modified_base 21: mod_base = OTHER; note = uracil
  modified_base 23: mod_base = OTHER; note = uracil
  source 1..23: mol_type = other DNA
tgggaccctctgcactgggcttt

SEQ ID NO: 285 - DNA, 23 bp, synthetic construct
  misc_feature 1..23: note = Synthetic oligonucleotide
  modified_base 2..3: mod_base = OTHER; note = uracil
  modified_base 5..6: mod_base = OTHER; note = uracil
  modified_base 17: mod_base = OTHER; note = uracil
  modified_base 23: mod_base = OTHER; note = uracil
  source 1..23: mol_type = other DNA
tttgttacccccgccatggagtt

SEQ ID NO: 286 - DNA, 23 bp, synthetic construct
  misc_feature 1..23: note = Synthetic oligonucleotide
  modified_base 4: mod_base = OTHER; note = uracil
  modified_base 6: mod_base = OTHER; note = uracil
  modified_base 11: mod_base = OTHER; note = uracil
  modified_base 19: mod_base = OTHER; note = uracil
  modified_base 23: mod_base = OTHER; note = uracil
  source 1..23: mol_type = other DNA
tcctgtgaggtcacccactgctt

SEQ ID NO: 287 - DNA, 23 bp, synthetic construct
  misc_feature 1..23: note = Synthetic oligonucleotide
  modified_base 2: mod_base = OTHER; note = uracil
  modified_base 4: mod_base = OTHER; note = uracil
  modified_base 7: mod_base = OTHER; note = uracil
  modified_base 17..18: mod_base = OTHER; note = uracil
  modified_base 23: mod_base = OTHER; note = uracil
  source 1..23: mol_type = other DNA
ttctgctggacagcccttgggtt

SEQ ID NO: 288 - DNA, 23 bp, synthetic construct
  misc_feature 1..23: note = Synthetic oligonucleotide
  modified_base 2: mod_base = OTHER; note = uracil
  modified_base 5: mod_base = OTHER; note = uracil
  modified_base 15: mod_base = OTHER; note = uracil
  modified_base 23: mod_base = OTHER; note = uracil
  source 1..23: mol_type = other DNA
ttgctccagcgggataccggatt

SEQ ID NO: 289 - DNA, 23 bp, synthetic construct
  misc_feature 1..23: note = Synthetic oligonucleotide
  modified_base 5: mod_base = OTHER; note = uracil
  modified_base 10: mod_base = OTHER; note = uracil
  modified_base 13: mod_base = OTHER; note = uracil
  modified_base 19: mod_base = OTHER; note = uracil
  modified_base 23: mod_base = OTHER; note = uracil
  source 1..23: mol_type = other DNA
tggctgggatcctccacgtcatt

SEQ ID NO: 290 - DNA, 23 bp, synthetic construct
  misc_feature 1..23: note = Synthetic oligonucleotide
  modified_base 2: mod_base = OTHER; note = uracil
  modified_base 4..5: mod_base = OTHER; note = uracil
  modified_base 7..8: mod_base = OTHER; note = uracil
  modified_base 19: mod_base = OTHER; note = uracil
  modified_base 23: mod_base = OTHER; note = uracil
  source 1..23: mol_type = other DNA
ttcttgttacccccgccatggtt

SEQ ID NO: 291 - DNA, 23 bp, synthetic construct
  misc_feature 1..23: note = Synthetic oligonucleotide
  modified_base 10: mod_base = OTHER; note = uracil
  modified_base 12: mod_base = OTHER; note = uracil
  modified_base 17: mod_base = OTHER; note = uracil
  modified_base 23: mod_base = OTHER; note = uracil
  source 1..23: mol_type = other DNA
tagggaccctctgcactgggctt

SEQ ID NO: 292 - DNA, 23 bp, synthetic construct
  misc_feature 1..23: note = Synthetic oligonucleotide
  modified_base 3: mod_base = OTHER; note = uracil
  modified_base 5..6: mod_base = OTHER; note = uracil
  modified_base 10: mod_base = OTHER; note = uracil
  modified_base 13: mod_base = OTHER; note = uracil
  modified_base 17: mod_base = OTHER; note = uracil
  modified_base 23: mod_base = OTHER; note = uracil
  source 1..23: mol_type = other DNA
tctgttggctgctcactggcatt

SEQ ID NO: 293 - RNA, 27 nt, synthetic construct
  misc_feature 1..27: note = Description of Artificial Sequence: Synthetic oligonucleotide
  source 1..27: mol_type = other RNA
accccgcggtccatcctcaggtccagc

SEQ ID NO: 294 - RNA, 27 nt, synthetic construct
  misc_feature 1..27: note = Description of Artificial Sequence: Synthetic oligonucleotide
  source 1..27: mol_type = other RNA
atgacaccaggaagcccagtgcagagg

SEQ ID NO: 295 - RNA, 27 nt, synthetic construct
  misc_feature 1..27: note = Description of Artificial Sequence: Synthetic oligonucleotide
  source 1..27: mol_type = other RNA
gaagcccagtgcagagggtcccttact

SEQ ID NO: 296 - RNA, 27 nt, synthetic construct
  misc_feature 1..27: note = Description of Artificial Sequence: Synthetic oligonucleotide
  source 1..27: mol_type = other RNA
aacgtctccatggcgggggtaacaaga

SEQ ID NO: 297 - DNA, 23 bp, synthetic construct
  misc_feature 1..23: note = Synthetic oligonucleotide
  modified_base 7: mod_base = OTHER; note = uracil
  modified_base 9: mod_base = OTHER; note = uracil
  modified_base 19: mod_base = OTHER; note = uracil
  modified_base 23: mod_base = OTHER; note = uracil
  source 1..23: mol_type = other DNA
tgccactgtagaaaggaatgatt

SEQ ID NO: 298 - DNA, 23 bp, synthetic construct
  misc_feature 1..23: note = Synthetic oligonucleotide
  modified_base 7: mod_base = OTHER; note = uracil
  modified_base 9: mod_base = OTHER; note = uracil
  modified_base 19: mod_base = OTHER; note = uracil
  modified_base 23: mod_base = OTHER; note = uracil
  source 1..23: mol_type = other DNA
tgccactgtagaaagggatgatt

SEQ ID NO: 299 - DNA, 23 bp, synthetic construct
  misc_feature 1..23: note = Synthetic oligonucleotide
  modified_base 7: mod_base = OTHER; note = uracil
  modified_base 9: mod_base = OTHER; note = uracil
  modified_base 17: mod_base = OTHER; note = uracil
  modified_base 19: mod_base = OTHER; note = uracil
  modified_base 23: mod_base = OTHER; note = uracil
  source 1..23: mol_type = other DNA
tgccactgtagaaaggtatgatt

SEQ ID NO: 300 - DNA, 23 bp, synthetic construct
  misc_feature 1..23: note = Synthetic oligonucleotide
  modified_base 7: mod_base = OTHER; note = uracil
  modified_base 9: mod_base = OTHER; note = uracil
  modified_base 19: mod_base = OTHER; note = uracil
  modified_base 23: mod_base = OTHER; note = uracil
  source 1..23: mol_type = other DNA
tgccactgtagaagggcatgatt

SEQ ID NO: 301 - DNA, 23 bp, synthetic construct
  misc_feature 1..23: note = Synthetic oligonucleotide
  modified_base 7: mod_base = OTHER; note = uracil
  modified_base 9: mod_base = OTHER; note = uracil
  modified_base 19: mod_base = OTHER; note = uracil
  modified_base 23: mod_base = OTHER; note = uracil
  source 1..23: mol_type = other DNA
tgccactgtagaacggcatgatt

SEQ ID NO: 302 - DNA, 23 bp, synthetic construct
  misc_feature 1..23: note = Synthetic oligonucleotide
  modified_base 7: mod_base = OTHER; note = uracil
  modified_base 9: mod_base = OTHER; note = uracil
  modified_base 14: mod_base = OTHER; note = uracil
  modified_base 19: mod_base = OTHER; note = uracil
  modified_base 23: mod_base = OTHER; note = uracil
  source 1..23: mol_type = other DNA
tgccactgtagaatggcatgatt

SEQ ID NO: 303 - DNA, 23 bp, synthetic construct
  misc_feature 1..23: note = Synthetic oligonucleotide
  modified_base 7: mod_base = OTHER; note = uracil
  modified_base 9: mod_base = OTHER; note = uracil
  modified_base 19: mod_base = OTHER; note = uracil
  modified_base 23: mod_base = OTHER; note = uracil
  source 1..23: mol_type = other DNA
tgccactgtagaaggggatgatt

SEQ ID NO: 304 - DNA, 25 bp, synthetic construct
  misc_feature 1..25: note = Synthetic oligonucleotide
  modified_base 7: mod_base = OTHER; note = uracil
  modified_base 9: mod_base = OTHER; note = uracil
  modified_base 19: mod_base = OTHER; note = uracil
  modified_base 25: mod_base = OTHER; note = uracil
  source 1..25: mol_type = other DNA
tgccactgtagaaaggcatgaagtt

SEQ ID NO: 305 - DNA, 24 bp, synthetic construct
  misc_feature 1..24: note = Synthetic oligonucleotide
  modified_base 7: mod_base = OTHER; note = uracil
  modified_base 9: mod_base = OTHER; note = uracil
  modified_base 19: mod_base = OTHER; note = uracil
  modified_base 24: mod_base = OTHER; note = uracil
  source 1..24: mol_type = other DNA
tgccactgtagaaaggcatgaatt

SEQ ID NO: 306 - DNA, 22 bp, synthetic construct
  misc_feature 1..22: note = Synthetic oligonucleotide
  modified_base 7: mod_base = OTHER; note = uracil
  modified_base 9: mod_base = OTHER; note = uracil
  modified_base 19: mod_base = OTHER; note = uracil
  modified_base 22: mod_base = OTHER; note = uracil
  source 1..22: mol_type = other DNA
tgccactgtagaaaggcatgtt

SEQ ID NO: 307 - DNA, 20 bp, synthetic construct
  misc_feature 1..20: note = Synthetic oligonucleotide
  modified_base 7: mod_base = OTHER; note = uracil
  modified_base 9: mod_base = OTHER; note = uracil
  modified_base 20: mod_base = OTHER; note = uracil
  source 1..20: mol_type = other DNA
tgccactgtagaaaggcatt

SEQ ID NO: 308 - DNA, 19 bp, synthetic construct
  misc_feature 1..19: note = Synthetic oligonucleotide
  modified_base 7: mod_base = OTHER; note = uracil
  modified_base 9: mod_base = OTHER; note = uracil
  modified_base 19: mod_base = OTHER; note = uracil
  source 1..19: mol_type = other DNA
tgccactgtagaaaggctt

SEQ ID NO: 309 - DNA, 20 bp, synthetic construct
  misc_feature 1..20: note = Synthetic oligonucleotide
  modified_base 7: mod_base = OTHER; note = uracil
  modified_base 9: mod_base = OTHER; note = uracil
  source 1..20: mol_type = other DNA
tgccactgtagaaaggcagg

SEQ ID NO: 310 - DNA, 19 bp, synthetic construct
  misc_feature 1..19: note = Synthetic oligonucleotide
  modified_base 7: mod_base = OTHER; note = uracil
  modified_base 9: mod_base = OTHER; note = uracil
  source 1..19: mol_type = other DNA
tgccactgtagaaaggcgg

SEQ ID NO: 311 - DNA, 23 bp, synthetic construct
  misc_feature 1..23: note = Synthetic oligonucleotide
  modified_base 7: mod_base = OTHER; note = uracil
  modified_base 9: mod_base = OTHER; note = uracil
  modified_base 19: mod_base = OTHER; note = uracil
  modified_base 23: mod_base = OTHER; note = uracil
  source 1..23: mol_type = other DNA
tgccactgtagaaaggcatgatt

SEQ ID NO: 312 - DNA, 23 bp, synthetic construct
  misc_feature 1..23: note = Synthetic oligonucleotide
  modified_base 7: mod_base = OTHER; note = uracil
  modified_base 9: mod_base = OTHER; note = uracil
  modified_base 19: mod_base = OTHER; note = uracil
  modified_base 23: mod_base = OTHER; note = uracil
  source 1..23: mol_type = other DNA
tgccactgtagaaaggcatgatt

SEQ ID NO: 313 - DNA, 23 bp, synthetic construct
  misc_feature 1..23: note = Synthetic oligonucleotide
  modified_base 7: mod_base = OTHER; note = uracil
  modified_base 9: mod_base = OTHER; note = uracil
  modified_base 19: mod_base = OTHER; note = uracil
  modified_base 23: mod_base = OTHER; note = uracil
  source 1..23: mol_type = other DNA
tgccactgtagaaaggcatgatt

SEQ ID NO: 314 - DNA, 23 bp, synthetic construct
  misc_feature 1..23: note = Synthetic oligonucleotide
  modified_base 7: mod_base = OTHER; note = uracil
  modified_base 9: mod_base = OTHER; note = uracil
  modified_base 19: mod_base = OTHER; note = uracil
  modified_base 23: mod_base = OTHER; note = uracil
  source 1..23: mol_type = other DNA
tgccactgtagaaaggcatgatt

SEQ ID NO: 315 - DNA, 23 bp, synthetic construct
  misc_feature 1..23: note = Synthetic oligonucleotide
  modified_base 7: mod_base = OTHER; note = uracil
  modified_base 9: mod_base = OTHER; note = uracil
  modified_base 19: mod_base = OTHER; note = uracil
  modified_base 23: mod_base = OTHER; note = uracil
  source 1..23: mol_type = other DNA
tgccactgtagaaaggcatgatt

SEQ ID NO: 316 - DNA, 23 bp, synthetic construct
  misc_feature 1..23: note = Synthetic oligonucleotide
  modified_base 7: mod_base = OTHER; note = uracil
  modified_base 9: mod_base = OTHER; note = uracil
  modified_base 19: mod_base = OTHER; note = uracil
  modified_base 23: mod_base = OTHER; note = uracil
  source 1..23: mol_type = other DNA
tgccactgtagaaaggcatgatt

SEQ ID NO: 317 - DNA, 23 bp, synthetic construct
  misc_feature 1..23: note = Synthetic oligonucleotide
  modified_base 7: mod_base = OTHER; note = uracil
  modified_base 9: mod_base = OTHER; note = uracil
  modified_base 19: mod_base = OTHER; note = uracil
  modified_base 23: mod_base = OTHER; note = uracil
  source 1..23: mol_type = other DNA
tgccactgtagaaaggcatgatt

SEQ ID NO: 318 - DNA, 23 bp, synthetic construct
  misc_feature 1..23: note = Synthetic oligonucleotide
  modified_base 7: mod_base = OTHER; note = uracil
  modified_base 9: mod_base = OTHER; note = uracil
  modified_base 19: mod_base = OTHER; note = uracil
  modified_base 23: mod_base = OTHER; note = uracil
  source 1..23: mol_type = other DNA
tgccactgtagaaaggcatgatt

SEQ ID NO: 319 - DNA, 23 bp, synthetic construct
  misc_feature 1..23: note = Synthetic oligonucleotide
  modified_base 7: mod_base = OTHER; note = uracil
  modified_base 9: mod_base = OTHER; note = uracil
  modified_base 19: mod_base = OTHER; note = uracil
  modified_base 23: mod_base = OTHER; note = uracil
  source 1..23: mol_type = other DNA
tgccactgtagaaaggcatgatt

SEQ ID NO: 320 - DNA, 23 bp, synthetic construct
  misc_feature 1..23: note = Synthetic oligonucleotide
  modified_base 7: mod_base = OTHER; note = uracil
  modified_base 9: mod_base = OTHER; note = uracil
  modified_base 19: mod_base = OTHER; note = uracil
  modified_base 23: mod_base = OTHER; note = uracil
  source 1..23: mol_type = other DNA
tgccactgtagaaaggcatgatt

SEQ ID NO: 321 - DNA, 23 bp, synthetic construct
  misc_feature 1..23: note = Synthetic oligonucleotide
  modified_base 7: mod_base = OTHER; note = uracil
  modified_base 9: mod_base = OTHER; note = uracil
  modified_base 19: mod_base = OTHER; note = uracil
  modified_base 23: mod_base = OTHER; note = uracil
  source 1..23: mol_type = other DNA
tgccactgtagaaaggcatgatt

SEQ ID NO: 322 - DNA, 23 bp, synthetic construct
  misc_feature 1..23: note = Synthetic oligonucleotide
  modified_base 7: mod_base = OTHER; note = uracil
  modified_base 9: mod_base = OTHER; note = uracil
  modified_base 19: mod_base = OTHER; note = uracil
  modified_base 23: mod_base = OTHER; note = uracil
  source 1..23: mol_type = other DNA
tgccactgtagaaaggcatgatt

SEQ ID NO: 323 - DNA, 23 bp, synthetic construct
  misc_feature 1..23: note = Synthetic oligonucleotide
  modified_base 7: mod_base = OTHER; note = uracil
  modified_base 9: mod_base = OTHER; note = uracil
  modified_base 19: mod_base = OTHER; note = uracil
  modified_base 23: mod_base = OTHER; note = uracil
  source 1..23: mol_type = other DNA
tgccactgtagaaaggcatgatt

SEQ ID NO: 324 - DNA, 23 bp, synthetic construct
  misc_feature 1..23: note = Synthetic oligonucleotide
  modified_base 7: mod_base = OTHER; note = uracil
  modified_base 9: mod_base = OTHER; note = uracil
  modified_base 19: mod_base = OTHER; note = uracil
  modified_base 23: mod_base = OTHER; note = uracil
  source 1..23: mol_type = other DNA
tgccactgtagaaaggcatgatt

SEQ ID NO: 325 - DNA, 23 bp, synthetic construct
  misc_feature 1..23: note = Synthetic oligonucleotide
  modified_base 7: mod_base = OTHER; note = uracil
  modified_base 9: mod_base = OTHER; note = uracil
  modified_base 19: mod_base = OTHER; note = uracil
  modified_base 23: mod_base = OTHER; note = uracil
  source 1..23: mol_type = other DNA
tgccactgtagaaaggcatgatt

SEQ ID NO: 326 - DNA, 23 bp, synthetic construct
  misc_feature 1..23: note = Synthetic oligonucleotide
  modified_base 7: mod_base = OTHER; note = uracil
  modified_base 9: mod_base = OTHER; note = uracil
  modified_base 19: mod_base = OTHER; note = uracil
  modified_base 23: mod_base = OTHER; note = uracil
  source 1..23: mol_type = other DNA
tgccactgtagaaaggcatgatt

SEQ ID NO: 327 - DNA, 23 bp, synthetic construct
  misc_feature 1..23: note = Synthetic oligonucleotide
  modified_base 7: mod_base = OTHER; note = uracil
  modified_base 9: mod_base = OTHER; note = uracil
  modified_base 19: mod_base = OTHER; note = uracil
  modified_base 23: mod_base = OTHER; note = uracil
  source 1..23: mol_type = other DNA
tgccactgtagaaaggcatgatt

SEQ ID NO: 328 - DNA, 23 bp, synthetic construct
  misc_feature 1..23: note = Synthetic oligonucleotide
  modified_base 7: mod_base = OTHER; note = uracil
  modified_base 9: mod_base = OTHER; note = uracil
  modified_base 19: mod_base = OTHER; note = uracil
  modified_base 23: mod_base = OTHER; note = uracil
  source 1..23: mol_type = other DNA
tgccactgtagaaaggcatgatt

SEQ ID NO: 329 - DNA, 23 bp, synthetic construct
  misc_feature 1..23: note = Synthetic oligonucleotide
  modified_base 7: mod_base = OTHER; note = uracil
  modified_base 9: mod_base = OTHER; note = uracil
  modified_base 19: mod_base = OTHER; note = uracil
  modified_base 23: mod_base = OTHER; note = uracil
  source 1..23: mol_type = other DNA
tgccactgtagaaaggcatgatt

SEQ ID NO: 330 - DNA, 23 bp, synthetic construct
  misc_feature 1..23: note = Synthetic oligonucleotide
  modified_base 7: mod_base = OTHER; note = uracil
  modified_base 9: mod_base = OTHER; note = uracil
  modified_base 19: mod_base = OTHER; note = uracil
  modified_base 23: mod_base = OTHER; note = uracil
  source 1..23: mol_type = other DNA
tgccactgtagaaaggcatgatt

SEQ ID NO: 331 - DNA, 23 bp, synthetic construct
  misc_feature 1..23: note = Synthetic oligonucleotide
  modified_base 7: mod_base = OTHER; note = uracil
  modified_base 9: mod_base = OTHER; note = uracil
  modified_base 19: mod_base = OTHER; note = uracil
  modified_base 23: mod_base = OTHER; note = uracil
  source 1..23: mol_type = other DNA
tgccactgtagaaaggcatgatt

SEQ ID NO: 332 - DNA, 23 bp, synthetic construct
  misc_feature 1..23: note = Synthetic oligonucleotide
  modified_base 7: mod_base = OTHER; note = uracil
  modified_base 9: mod_base = OTHER; note = uracil
  modified_base 19: mod_base = OTHER; note = uracil
  modified_base 23: mod_base = OTHER; note = uracil
  source 1..23: mol_type = other DNA
tgccactgtagaaaggcatgatt

SEQ ID NO: 333 - DNA, 23 bp, synthetic construct
  misc_feature 1..23: note = Synthetic oligonucleotide
  modified_base 7: mod_base = OTHER; note = uracil
  modified_base 9: mod_base = OTHER; note = uracil
  modified_base 19: mod_base = OTHER; note = uracil
  modified_base 23: mod_base = OTHER; note = uracil
  source 1..23: mol_type = other DNA
tgccactgtagaaaggcatgatt

SEQ ID NO: 334 - DNA, 23 bp, synthetic construct
  misc_feature 1..23: note = Synthetic oligonucleotide
  modified_base 7: mod_base = OTHER; note = uracil
  modified_base 9: mod_base = OTHER; note = uracil
  modified_base 19: mod_base = OTHER; note = uracil
  source 1..23: mol_type = other DNA
tgccactgtagaaaggcatgata

SEQ ID NO: 335 - DNA, 23 bp, synthetic construct
  misc_feature 1..23: note = Synthetic oligonucleotide
  modified_base 7: mod_base = OTHER; note = uracil
  modified_base 9: mod_base = OTHER; note = uracil
  modified_base 19: mod_base = OTHER; note = uracil
  source 1..23: mol_type = other DNA
tgccactgtagaaaggcatgatg

SEQ ID NO: 336 - DNA, 23 bp, synthetic construct
  misc_feature 1..23: note = Synthetic oligonucleotide
  modified_base 7: mod_base = OTHER; note = uracil
  modified_base 9: mod_base = OTHER; note = uracil
  modified_base 19: mod_base = OTHER; note = uracil
  source 1..23: mol_type = other DNA
tgccactgtagaaaggcatgatc

SEQ ID NO: 337 - DNA, 21 bp, synthetic construct
  misc_feature 1..21: note = Synthetic oligonucleotide
  modified_base 7: mod_base = OTHER; note = uracil
  modified_base 9: mod_base = OTHER; note = uracil
  modified_base 19: mod_base = OTHER; note = uracil
  source 1..21: mol_type = other DNA
tgccactgtagaaaggcatta

SEQ ID NO: 338 - DNA, 21 bp, synthetic construct
  misc_feature 1..21: note = Synthetic oligonucleotide
  modified_base 7: mod_base = OTHER; note = uracil
  modified_base 9: mod_base = OTHER; note = uracil
  modified_base 19: mod_base = OTHER; note = uracil
  source 1..21: mol_type = other DNA
tgccactgtagaaaggcattg

SEQ ID NO: 339 - DNA, 21 bp, synthetic construct
  misc_feature 1..21: note = Synthetic oligonucleotide
  modified_base 7: mod_base = OTHER; note = uracil
  modified_base 9: mod_base = OTHER; note = uracil
  modified_base 19: mod_base = OTHER; note = uracil
  source 1..21: mol_type = other DNA
tgccactgtagaaaggcattc

SEQ ID NO: 340 - DNA, 23 bp, synthetic construct
  misc_feature 1..23: note = Synthetic oligonucleotide
  modified_base 7: mod_base = OTHER; note = uracil
  modified_base 9: mod_base = OTHER; note = uracil
  modified_base 19: mod_base = OTHER; note = uracil
  modified_base 23: mod_base = OTHER; note = uracil
  source 1..23: mol_type = other DNA
tgccactgtagaaaggcatgatt

SEQ ID NO: 341 - DNA, 23 bp, synthetic construct
  misc_feature 1..23: note = Synthetic oligonucleotide
  modified_base 7: mod_base = OTHER; note = uracil
  modified_base 9: mod_base = OTHER; note = uracil
  modified_base 19: mod_base = OTHER; note = uracil
  modified_base 23: mod_base = OTHER; note = uracil
  source 1..23: mol_type = other DNA
tgccactgtagaaaggcatgatt

SEQ ID NO: 342 - DNA, 23 bp, synthetic construct
  misc_feature 1..23: note = Synthetic oligonucleotide
  modified_base 7: mod_base = OTHER; note = uracil
  modified_base 9: mod_base = OTHER; note = uracil
  modified_base 19: mod_base = OTHER; note = uracil
  modified_base 23: mod_base = OTHER; note = uracil
  source 1..23: mol_type = other DNA
tgccactgtagaaaggcatgatt

SEQ ID NO: 343 - DNA, 23 bp, synthetic construct
  misc_feature 1..23: note = Synthetic oligonucleotide
  modified_base 7: mod_base = OTHER; note = uracil
  modified_base 9: mod_base = OTHER; note = uracil
  modified_base 19: mod_base = OTHER; note = uracil
  modified_base 23: mod_base = OTHER; note = uracil
  source 1..23: mol_type = other DNA
tgccactgtagaaaggcatgatt

SEQ ID NO: 344 - DNA, 23 bp, synthetic construct
  misc_feature 1..23: note = Synthetic oligonucleotide
  modified_base 7: mod_base = OTHER; note = uracil
  modified_base 9: mod_base = OTHER; note = uracil
  modified_base 19: mod_base = OTHER; note = uracil
  modified_base 23: mod_base = OTHER; note = uracil
  source 1..23: mol_type = other DNA
tgccactgtagaaaggcatgatt

SEQ ID NO: 345 - DNA, 23 bp, synthetic construct
  misc_feature 1..23: note = Synthetic oligonucleotide
  modified_base 7: mod_base = OTHER; note = uracil
  modified_base 9: mod_base = OTHER; note = uracil
  modified_base 19: mod_base = OTHER; note = uracil
  modified_base 23: mod_base = OTHER; note = uracil
  source 1..23: mol_type = other DNA
tgccactgtagaaaggcatgatt

SEQ ID NO: 346 - DNA, 23 bp, synthetic construct
  misc_feature 1..23: note = Synthetic oligonucleotide
  modified_base 7: mod_base = OTHER; note = uracil
  modified_base 9: mod_base = OTHER; note = uracil
  modified_base 19: mod_base = OTHER; note = uracil
  modified_base 23: mod_base = OTHER; note = uracil
  source 1..23: mol_type = other DNA
tgccactgtagaaaggcatgatt

SEQ ID NO: 347 - DNA, 23 bp, synthetic construct
  misc_feature 1..23: note = Synthetic oligonucleotide
  modified_base 7: mod_base = OTHER; note = uracil
  modified_base 9: mod_base = OTHER; note = uracil
  modified_base 19: mod_base = OTHER; note = uracil
  modified_base 23: mod_base = OTHER; note = uracil
  source 1..23: mol_type = other DNA
tgccactgtagaaaggcatgatt

SEQ ID NO: 348 - DNA, 23 bp, synthetic construct
  misc_feature 1..23: note = Synthetic oligonucleotide
  modified_base 7: mod_base = OTHER; note = uracil
  modified_base 9: mod_base = OTHER; note = uracil
  modified_base 19: mod_base = OTHER; note = uracil
  modified_base 23: mod_base = OTHER; note = uracil
  source 1..23: mol_type = other DNA
tgccactgtagaaaggcatgatt

SEQ ID NO: 349 - DNA, 23 bp, synthetic construct
  misc_feature 1..23: note = Synthetic oligonucleotide
  modified_base 7: mod_base = OTHER; note = uracil
  modified_base 9: mod_base = OTHER; note = uracil
  modified_base 19: mod_base = OTHER; note = uracil
  modified_base 23: mod_base = OTHER; note = uracil
  source 1..23: mol_type = other DNA
tgccactgtagaaaggcatgatt

SEQ ID NO: 350 - DNA, 23 bp, synthetic construct
  misc_feature 1..23: note = Synthetic oligonucleotide
  modified_base 7: mod_base = OTHER; note = uracil
  modified_base 9: mod_base = OTHER; note = uracil
  modified_base 19: mod_base = OTHER; note = uracil
  modified_base 23: mod_base = OTHER; note = uracil
  source 1..23: mol_type = other DNA
tgccactgtagaaaggcatgatt

SEQ ID NO: 351 - DNA, 23 bp, synthetic construct
  misc_feature 1..23: note = Synthetic oligonucleotide
  modified_base 7: mod_base = OTHER; note = uracil
  modified_base 9: mod_base = OTHER; note = uracil
  modified_base 19: mod_base = OTHER; note = uracil
  modified_base 23: mod_base = OTHER; note = uracil
  source 1..23: mol_type = other DNA
tgccactgtagaaaggcatgatt

SEQ ID NO: 352 - DNA, 23 bp, synthetic construct
  misc_feature 1..23: note = Synthetic oligonucleotide
  modified_base 7: mod_base = OTHER; note = uracil
  modified_base 9: mod_base = OTHER; note = uracil
  modified_base 19: mod_base = OTHER; note = uracil
  modified_base 23: mod_base = OTHER; note = uracil
  source 1..23: mol_type = other DNA
tgccactgtagaaaggcatgatt

SEQ ID NO: 353 - DNA, 23 bp, synthetic construct
  misc_feature 1..23: note = Synthetic oligonucleotide
  modified_base 7: mod_base = OTHER; note = uracil
  modified_base 9: mod_base = OTHER; note = uracil
  modified_base 19: mod_base = OTHER; note = uracil
  modified_base 23: mod_base = OTHER; note = uracil
  source 1..23: mol_type = other DNA
tgccactgtagaaaggcatgatt

SEQ ID NO: 354 - DNA, 23 bp, synthetic construct
  misc_feature 1..23: note = Synthetic oligonucleotide
  modified_base 7: mod_base = OTHER; note = uracil
  modified_base 9: mod_base = OTHER; note = uracil
  modified_base 19: mod_base = OTHER; note = uracil
  modified_base 23: mod_base = OTHER; note = uracil
  source 1..23: mol_type = other DNA
tgccactgtagaaaggcatgatt

SEQ ID NO: 355 - DNA, 23 bp, synthetic construct
  misc_feature 1..23: note = Synthetic oligonucleotide
  modified_base 7: mod_base = OTHER; note = uracil
  modified_base 9: mod_base = OTHER; note = uracil
  modified_base 19: mod_base = OTHER; note = uracil
  modified_base 23: mod_base = OTHER; note = uracil
  source 1..23: mol_type = other DNA
tgccactgtagaaaggcatgatt

SEQ ID NO: 356 - DNA, 23 bp, synthetic construct
  misc_feature 1..23: note = Synthetic oligonucleotide
  modified_base 7: mod_base = OTHER; note = uracil
  modified_base 9: mod_base = OTHER; note = uracil
  modified_base 19: mod_base = OTHER; note = uracil
  modified_base 23: mod_base = OTHER; note = uracil
  source 1..23: mol_type = other DNA
tgccactgtagaaaggcatgatt

SEQ ID NO: 357 - DNA, 23 bp, synthetic construct
  misc_feature 1..23: note = Synthetic oligonucleotide
  modified_base 7: mod_base = OTHER; note = uracil
  modified_base 9: mod_base = OTHER; note = uracil
  modified_base 19: mod_base = OTHER; note = uracil
  modified_base 23: mod_base = OTHER; note = uracil
  source 1..23: mol_type = other DNA
tgccactgtagaaaggcatgatt

SEQ ID NO: 358 - DNA, 23 bp, synthetic construct
  misc_feature 1..23: note = Synthetic oligonucleotide
  modified_base 7: mod_base = OTHER; note = uracil
  modified_base 9: mod_base = OTHER; note = uracil
  modified_base 19: mod_base = OTHER; note = uracil
  modified_base 23: mod_base = OTHER; note = uracil
  source 1..23: mol_type = other DNA
tgccactgtagaaaggcatgatt

SEQ ID NO: 359 - DNA, 23 bp, synthetic construct
  misc_feature 1..23: note = Synthetic oligonucleotide
  modified_base 7: mod_base = OTHER; note = uracil
  modified_base 9: mod_base = OTHER; note = uracil
  modified_base 19: mod_base = OTHER; note = uracil
  modified_base 23: mod_base = OTHER; note = uracil
  source 1..23: mol_type = other DNA
tgccactgtagaaaggcatgatt

SEQ ID NO: 360 - DNA, 23 bp, synthetic construct
  misc_feature 1..23: note = Synthetic oligonucleotide
  modified_base 7: mod_base = OTHER; note = uracil
  modified_base 9: mod_base = OTHER; note = uracil
  modified_base 19: mod_base = OTHER; note = uracil
  modified_base 23: mod_base = OTHER; note = uracil
  source 1..23: mol_type = other DNA
tgccactgtagaaaggcatgatt

SEQ ID NO: 361 - DNA, 23 bp, synthetic construct
  misc_feature 1..23: note = Synthetic oligonucleotide
  modified_base 7: mod_base = OTHER; note = uracil
  modified_base 9: mod_base = OTHER; note = uracil
  modified_base 19: mod_base = OTHER; note = uracil
  modified_base 23: mod_base = OTHER; note = uracil
  source 1..23: mol_type = other DNA
tgccactgtagaaaggcatgatt

SEQ ID NO: 362 - DNA, 23 bp, synthetic construct
  misc_feature 1..23: note = Synthetic oligonucleotide
  modified_base 7: mod_base = OTHER; note = uracil
  modified_base 9: mod_base = OTHER; note = uracil
  modified_base 19: mod_base = OTHER; note = uracil
  modified_base 23: mod_base = OTHER; note = uracil
  source 1..23: mol_type = other DNA
tgccactgtagaaaggcatgatt

SEQ ID NO: 363 - DNA, 23 bp, synthetic construct
  misc_feature 1..23: note = Synthetic oligonucleotide
  modified_base 7: mod_base = OTHER; note = uracil
  modified_base 9: mod_base = OTHER; note = uracil
  modified_base 19: mod_base = OTHER; note = uracil
  modified_base 23: mod_base = OTHER; note = uracil
  source 1..23: mol_type = other DNA
tgccactgtagaaaggcatgatt

SEQ ID NO: 364 - DNA, 23 bp, synthetic construct
  misc_feature 1..23: note = Synthetic oligonucleotide
  modified_base 1: mod_base = OTHER; note = uracil
  modified_base 7: mod_base = OTHER; note = uracil
  modified_base 9: mod_base = OTHER; note = uracil
  modified_base 19: mod_base = OTHER; note = uracil
  modified_base 23: mod_base = OTHER; note = uracil
  source 1..23: mol_type = other DNA
tgccactgtagaaaggcatgatt

SEQ ID NO: 365 - DNA, 23 bp, synthetic construct
  misc_feature 1..23: note = Synthetic oligonucleotide
  modified_base 7: mod_base = OTHER; note = uracil
  modified_base 9: mod_base = OTHER; note = uracil
  modified_base 19: mod_base = OTHER; note = uracil
  modified_base 23: mod_base = OTHER; note = uracil
  source 1..23: mol_type = other DNA
agccactgtagaaaggcatgatt

SEQ ID NO: 366 - DNA, 23 bp, synthetic construct
  misc_feature 1..23: note = Synthetic oligonucleotide
  modified_base 7: mod_base = OTHER; note = uracil
  modified_base 9: mod_base = OTHER; note = uracil
  modified_base 19: mod_base = OTHER; note = uracil
  modified_base 23: mod_base = OTHER; note = uracil
  source 1..23: mol_type = other DNA
ggccactgtagaaaggcatgatt

SEQ ID NO: 367 - DNA, 23 bp, synthetic construct
  misc_feature 1..23: note = Synthetic oligonucleotide
  modified_base 7: mod_base = OTHER; note = uracil
  modified_base 9: mod_base = OTHER; note = uracil
  modified_base 19: mod_base = OTHER; note = uracil
  modified_base 23: mod_base = OTHER; note = uracil
  source 1..23: mol_type = other DNA
cgccactgtagaaaggcatgatt

SEQ ID NO: 368 - DNA, 23 bp, synthetic construct
  misc_feature 1..23: note = Synthetic oligonucleotide
  modified_base 1: mod_base = OTHER; note = uracil
  modified_base 7: mod_base = OTHER; note = uracil
  modified_base 9: mod_base = OTHER; note = uracil
  modified_base 19: mod_base = OTHER; note = uracil
  modified_base 23: mod_base = OTHER; note = uracil
  source 1..23: mol_type = other DNA
tgccactgtagaaaggcatgatt

SEQ ID NO: 369 - DNA, 23 bp, synthetic construct
  misc_feature 1..23: note = Synthetic oligonucleotide
  modified_base 7: mod_base = OTHER; note = uracil
  modified_base 9: mod_base = OTHER; note = uracil
  modified_base 19: mod_base = OTHER; note = uracil
  modified_base 23: mod_base = OTHER; note = uracil
  source 1..23: mol_type = other DNA
agccactgtagaaaggcatgatt

SEQ ID NO: 370 - DNA, 23 bp, synthetic construct
  misc_feature 1..23: note = Synthetic oligonucleotide
  modified_base 7: mod_base = OTHER; note = uracil
  modified_base 9: mod_base = OTHER; note = uracil
  modified_base 19: mod_base = OTHER; note = uracil
  modified_base 23: mod_base = OTHER; note = uracil
  source 1..23: mol_type = other DNA
ggccactgtagaaaggcatgatt

SEQ ID NO: 371 - DNA, 23 bp, synthetic construct
  misc_feature 1..23: note = Synthetic oligonucleotide
  modified_base 7: mod_base = OTHER; note = uracil
  modified_base 9: mod_base = OTHER; note = uracil
  modified_base 19: mod_base = OTHER; note = uracil
  modified_base 23: mod_base = OTHER; note = uracil
  source 1..23: mol_type = other DNA
cgccactgtagaaaggcatgatt

SEQ ID NO: 372 - DNA, 23 bp, synthetic construct
  misc_feature 1..23: note = Synthetic oligonucleotide
  modified_base 7: mod_base = OTHER; note = uracil
  modified_base 9: mod_base = OTHER; note = uracil
  modified_base 19: mod_base = OTHER; note = uracil
  modified_base 23: mod_base = OTHER; note = uracil
  source 1..23: mol_type = other DNA
tgccactgtagaaaggcatgatt

SEQ ID NO: 373 - DNA, 23 bp, synthetic construct
  misc_feature 1..23: note = Synthetic oligonucleotide
  modified_base 7: mod_base = OTHER; note = uracil
  modified_base 9: mod_base = OTHER; note = uracil
  modified_base 19: mod_base = OTHER; note = uracil
  modified_base 23: mod_base = OTHER; note = uracil
  source 1..23: mol_type = other DNA
tgccactgtagaaaggcatgatt

SEQ ID NO: 374 - DNA, 23 bp, synthetic construct
  misc_feature 1..23: note = Synthetic oligonucleotide
  modified_base 7: mod_base = OTHER; note = uracil
  modified_base 9: mod_base = OTHER; note = uracil
  modified_base 19: mod_base = OTHER; note = uracil
  modified_base 23: mod_base = OTHER; note = uracil
  source 1..23: mol_type = other DNA
tgccactgtagaaaggcatgatt

SEQ ID NO: 375 - DNA, 23 bp, synthetic construct
  misc_feature 1..23: note = Synthetic oligonucleotide
  modified_base 7: mod_base = OTHER; note = uracil
  modified_base 9: mod_base = OTHER; note = uracil
  modified_base 19: mod_base = OTHER; note = uracil
  modified_base 23: mod_base = OTHER; note = uracil
  source 1..23: mol_type = other DNA
tgccactgtagaaaggcatgatt

SEQ ID NO: 376 - DNA, 23 bp, synthetic construct
  misc_feature 1..23: note = Synthetic oligonucleotide
  modified_base 7: mod_base = OTHER; note = uracil
  modified_base 9: mod_base = OTHER; note = uracil
  modified_base 19: mod_base = OTHER; note = uracil
  modified_base 23: mod_base = OTHER; note = uracil
  source 1..23: mol_type = other DNA
tgccactgtagaaaggcatgatt

SEQ ID NO: 377 - DNA, 23 bp, synthetic construct
  misc_feature 1..23: note = Synthetic oligonucleotide
  modified_base 7: mod_base = OTHER; note = uracil
  modified_base 9: mod_base = OTHER; note = uracil
  modified_base 19: mod_base = OTHER; note = uracil
  modified_base 23: mod_base = OTHER; note = uracil
  source 1..23: mol_type = other DNA
tgccactgtagaaaggcatgatt

SEQ ID NO: 378 - DNA, 23 bp, synthetic construct
  misc_feature 1..23: note = Synthetic oligonucleotide
  modified_base 9: mod_base = OTHER; note = uracil
  modified_base 19: mod_base = OTHER; note = uracil
  modified_base 23: mod_base = OTHER; note = uracil
  source 1..23: mol_type = other DNA
tgccactgtagaaaggcatgatt

SEQ ID NO: 379 - DNA, 23 bp, synthetic construct
  misc_feature 1..23: note = Synthetic oligonucleotide
  modified_base 7: mod_base = OTHER; note = uracil
  modified_base 9: mod_base = OTHER; note = uracil
  modified_base 19: mod_base = OTHER; note = uracil
  modified_base 23: mod_base = OTHER; note = uracil
  source 1..23: mol_type = other DNA
tgccactgtagaaaggcatgatt

SEQ ID NO: 380 - DNA, 23 bp, synthetic construct
  misc_feature 1..23: note = Synthetic oligonucleotide
  modified_base 7: mod_base = OTHER; note = uracil
  modified_base 19: mod_base = OTHER; note = uracil
  modified_base 23: mod_base = OTHER; note = uracil
  source 1..23: mol_type = other DNA
tgccactgtagaaaggcatgatt

SEQ ID NO: 381 - DNA, 23 bp, synthetic construct
  misc_feature 1..23: note = Synthetic oligonucleotide
  modified_base 7: mod_base = OTHER; note = uracil
  modified_base 9: mod_base = OTHER; note = uracil
  modified_base 19: mod_base = OTHER; note = uracil
  modified_base 23: mod_base = OTHER; note = uracil
  source 1..23: mol_type = other DNA
tgccactgtagaaaggcatgatt

SEQ ID NO: 382 - DNA, 23 bp, synthetic construct
  misc_feature 1..23: note = Synthetic oligonucleotide
  modified_base 7: mod_base = OTHER; note = uracil
  modified_base 9: mod_base = OTHER; note = uracil
  modified_base 19: mod_base = OTHER; note = uracil
  modified_base 23: mod_base = OTHER; note = uracil
  source 1..23: mol_type = other DNA
tgccactgtagaaaggcatgatt

SEQ ID NO: 383 - DNA, 23 bp, synthetic construct
  misc_feature 1..23: note = Synthetic oligonucleotide
  modified_base 7: mod_base = OTHER; note = uracil
  modified_base 9: mod_base = OTHER; note = uracil
  modified_base 19: mod_base = OTHER; note = uracil
  modified_base 23: mod_base = OTHER; note = uracil
  source 1..23: mol_type = other DNA
tgccactgtagaaaggcatgatt

SEQ ID NO: 384 - DNA, 23 bp, synthetic construct
  misc_feature 1..23: note = Synthetic oligonucleotide
  modified_base 7: mod_base = OTHER; note = uracil
  modified_base 9: mod_base = OTHER; note = uracil
  modified_base 19: mod_base = OTHER; note = uracil
  modified_base 23: mod_base = OTHER; note = uracil
  source 1..23: mol_type = other DNA
tgccactgtagaaaggcatgatt

SEQ ID NO: 385 - DNA, 23 bp, synthetic construct
  misc_feature 1..23: note = Synthetic oligonucleotide
  modified_base 7: mod_base = OTHER; note = uracil
  modified_base 9: mod_base = OTHER; note = uracil
  modified_base 19: mod_base = OTHER; note = uracil
  modified_base 23: mod_base = OTHER; note = uracil
  source 1..23: mol_type = other DNA
tgccactgtagaaaggcatgatt

SEQ ID NO: 386 - DNA, 23 bp, synthetic construct
  misc_feature 1..23: note = Synthetic oligonucleotide
  modified_base 7: mod_base = OTHER; note = uracil
  modified_base 9: mod_base = OTHER; note = uracil
  modified_base 19: mod_base = OTHER; note = uracil
  modified_base 23: mod_base = OTHER; note = uracil
  source 1..23: mol_type = other DNA
tgccactgtagaaaggcatgatt

SEQ ID NO: 387 - DNA, 23 bp, synthetic construct
  misc_feature 1..23: note = Synthetic oligonucleotide
  modified_base 7: mod_base = OTHER; note = uracil
  modified_base 9: mod_base = OTHER; note = uracil
  modified_base 19: mod_base = OTHER; note = uracil
  modified_base 23: mod_base = OTHER; note = uracil
  source 1..23: mol_type = other DNA
tgccactgtagaaaggcatgatt

SEQ ID NO: 388 - DNA, 23 bp, synthetic construct
  misc_feature 1..23: note = Synthetic oligonucleotide
  modified_base 7: mod_base = OTHER; note = uracil
  modified_base 9: mod_base = OTHER; note = uracil
  modified_base 19: mod_base = OTHER; note = uracil
  modified_base 23: mod_base = OTHER; note = uracil
  source 1..23: mol_type = other DNA
tgccactgtagaaaggcatgatt

SEQ ID NO: 389 - DNA, 23 bp, synthetic construct
  misc_feature 1..23: note = Synthetic oligonucleotide
  modified_base 7: mod_base = OTHER; note = uracil
  modified_base 9: mod_base = OTHER; note = uracil
  modified_base 19: mod_base = OTHER; note = uracil
  modified_base 23: mod_base = OTHER; note = uracil
  source 1..23: mol_type = other DNA
tgccactgtagaaaggcatgatt

SEQ ID NO: 390 - DNA, 23 bp, synthetic construct
  misc_feature 1..23: note = Synthetic oligonucleotide
  modified_base 7: mod_base = OTHER; note = uracil
  modified_base 9: mod_base = OTHER; note = uracil
  modified_base 23: mod_base = OTHER; note = uracil
  source 1..23: mol_type = other DNA
tgccactgtagaaaggcatgatt

SEQ ID NO: 391 - DNA, 23 bp, synthetic construct
  misc_feature 1..23: note = Synthetic oligonucleotide
  modified_base 7: mod_base = OTHER; note = uracil
  modified_base 9: mod_base = OTHER; note = uracil
  modified_base 19: mod_base = OTHER; note = uracil
  modified_base 23: mod_base = OTHER; note = uracil
  source 1..23: mol_type = other DNA
tgccactgtagaaaggcatgatt

SEQ ID NO: 392 - DNA, 23 bp, synthetic construct
  misc_feature 1..23: note = Synthetic oligonucleotide
  modified_base 7: mod_base = OTHER; note = uracil
  modified_base 9: mod_base = OTHER; note = uracil
  modified_base 19: mod_base = OTHER; note = uracil
  modified_base 23: mod_base = OTHER; note = uracil
  source 1..23: mol_type = other DNA
tgccactgtagaaaggcatgatt

SEQ ID NO: 393 - DNA, 23 bp, synthetic construct
  misc_feature 1..23: note = Synthetic oligonucleotide
  modified_base 7: mod_base = OTHER; note = uracil
  modified_base 9: mod_base = OTHER; note = uracil
  modified_base 19: mod_base = OTHER; note = uracil
  modified_base 23: mod_base = OTHER; note = uracil
  source 1..23: mol_type = other DNA
tgccactgtagaaaggcatgatt

SEQ ID NO: 394 - DNA, 23 bp, synthetic construct
  misc_feature 1..23: note = Synthetic oligonucleotide
  modified_base 9: mod_base = OTHER; note = uracil
  modified_base 19: mod_base = OTHER; note = uracil
  modified_base 23: mod_base = OTHER; note = uracil
  source 1..23: mol_type = other DNA
tgccactgtagaaaggcatgatt

SEQ ID NO: 395 - DNA, 23 bp, synthetic construct
  misc_feature 1..23: note = Synthetic oligonucleotide
  modified_base 9: mod_base = OTHER; note = uracil
  modified_base 19: mod_base = OTHER; note = uracil
  modified_base 23: mod_base = OTHER; note = uracil
  source 1..23: mol_type = other DNA
tgccactgtagaaaggcatgatt

SEQ ID NO: 396 - DNA, 23 bp, synthetic construct
  misc_feature 1..23: note = Synthetic oligonucleotide
  modified_base 9: mod_base = OTHER; note = uracil
  modified_base 19: mod_base = OTHER; note = uracil
  modified_base 23: mod_base = OTHER; note = uracil
  source 1..23: mol_type = other DNA
tgccactgtagaaaggcatgatt

SEQ ID NO: 397 - DNA, 23 bp, synthetic construct
  misc_feature 1..23: note = Synthetic oligonucleotide
  modified_base 7: mod_base = OTHER; note = uracil
  modified_base 9: mod_base = OTHER; note = uracil
  modified_base 19: mod_base = OTHER; note = uracil
  modified_base 23: mod_base = OTHER; note = uracil
  source 1..23: mol_type = other DNA
tgccactgtagaaaggcatgatt

SEQ ID NO: 398 - DNA, 23 bp, synthetic construct
  misc_feature 1..23: note = Synthetic oligonucleotide
  modified_base 7: mod_base = OTHER; note = uracil
  modified_base 9: mod_base = OTHER; note = uracil
  modified_base 19: mod_base = OTHER; note = uracil
  modified_base 23: mod_base = OTHER; note = uracil
  source 1..23: mol_type = other DNA
agccactgtagaaaggcatgatt

SEQ ID NO: 399 - DNA, 23 bp, synthetic construct
  misc_feature 1..23: note = Synthetic oligonucleotide
  modified_base 7: mod_base = OTHER; note = uracil
  modified_base 9: mod_base = OTHER; note = uracil
  modified_base 19: mod_base = OTHER; note = uracil
  modified_base 23: mod_base = OTHER; note = uracil
  source 1..23: mol_type = other DNA
ggccactgtagaaaggcatgatt

SEQ ID NO: 400 - DNA, 23 bp, synthetic construct
  misc_feature 1..23: note = Synthetic oligonucleotide
  modified_base 7: mod_base = OTHER; note = uracil
  modified_base 9: mod_base = OTHER; note = uracil
  modified_base 19: mod_base = OTHER; note = uracil
  modified_base 23: mod_base = OTHER; note = uracil
  source 1..23: mol_type = other DNA
cgccactgtagaaaggcatgatt

SEQ ID NO: 401 - DNA, 23 bp, synthetic construct
  misc_feature 1..23: note = Synthetic oligonucleotide
  modified_base 7: mod_base = OTHER; note = uracil
  modified_base 9: mod_base = OTHER; note = uracil
  modified_base 19: mod_base = OTHER; note = uracil
  modified_base 23: mod_base = OTHER; note = uracil
  source 1..23: mol_type = other DNA
tgccactgtagaaaggcatgatt

SEQ ID NO: 402 - DNA, 23 bp, synthetic construct
  misc_feature 1..23: note = Synthetic oligonucleotide
  modified_base 7: mod_base = OTHER; note = uracil
  modified_base 9: mod_base = OTHER; note = uracil
  modified_base 19: mod_base = OTHER; note = uracil
  modified_base 23: mod_base = OTHER; note = uracil
  source 1..23: mol_type = other DNA
tgccactgtagaaaggcatgatt

SEQ ID NO: 403 - DNA, 23 bp, synthetic construct
  misc_feature 1..23: note = Synthetic oligonucleotide
  modified_base 7: mod_base = OTHER; note = uracil
  modified_base 9: mod_base = OTHER; note = uracil
  modified_base 19: mod_base = OTHER; note = uracil
  modified_base 23: mod_base = OTHER; note = uracil
  source 1..23: mol_type = other DNA
tgccactgtagaaaggcatgatt

SEQ ID NO: 404 - DNA, 23 bp, synthetic construct
  misc_feature 1..23: note = Synthetic oligonucleotide
  modified_base 7: mod_base = OTHER; note = uracil
  modified_base 9: mod_base = OTHER; note = uracil
  modified_base 19: mod_base = OTHER; note = uracil
  modified_base 23: mod_base = OTHER; note = uracil
  source 1..23: mol_type = other DNA
tgccactgtagaaaggcatgatt

SEQ ID NO: 405 - DNA, 23 bp, synthetic construct
  misc_feature 1..23: note = Synthetic oligonucleotide
  modified_base 7: mod_base = OTHER; note = uracil
  modified_base 9: mod_base = OTHER; note = uracil
  modified_base 19: mod_base = OTHER; note = uracil
  modified_base 23: mod_base = OTHER; note = uracil
  source 1..23: mol_type = other DNA
tgccactgtagaaaggcatgatt

SEQ ID NO: 406 - DNA, 23 bp, synthetic construct
  misc_feature 1..23: note = Synthetic oligonucleotide
  modified_base 9: mod_base = OTHER; note = uracil
  modified_base 19: mod_base = OTHER; note = uracil
  modified_base 23: mod_base = OTHER; note = uracil
  source 1..23: mol_type = other DNA
tgccactgtagaaaggcatgatt

SEQ ID NO: 407 - DNA, 23 bp, synthetic construct
  misc_feature 1..23: note = Synthetic oligonucleotide
  modified_base 7: mod_base = OTHER; note = uracil
  modified_base 9: mod_base = OTHER; note = uracil
  modified_base 19: mod_base = OTHER; note = uracil
  modified_base 23: mod_base = OTHER; note = uracil
  source 1..23: mol_type = other DNA
tgccactgtagaaaggcatgatt

SEQ ID NO: 408 - DNA, 23 bp, synthetic construct
  misc_feature 1..23: note = Synthetic oligonucleotide
  modified_base 7: mod_base = OTHER; note = uracil
  modified_base 19: mod_base = OTHER; note = uracil
  modified_base 23: mod_base = OTHER; note = uracil
  source 1..23: mol_type = other DNA
tgccactgtagaaaggcatgatt

SEQ ID NO: 409 - DNA, 23 bp, synthetic construct
  misc_feature 1..23: note = Synthetic oligonucleotide
  modified_base 7: mod_base = OTHER; note = uracil
  modified_base 9: mod_base = OTHER; note = uracil
  modified_base 19: mod_base = OTHER; note = uracil
  modified_base 23: mod_base = OTHER; note = uracil
  source 1..23: mol_type = other DNA
tgccactgtagaaaggcatgatt

SEQ ID NO: 410 - DNA, 23 bp, synthetic construct
  misc_feature 1..23: note = Synthetic oligonucleotide
  modified_base 7: mod_base = OTHER; note = uracil
  modified_base 9: mod_base = OTHER; note = uracil
  modified_base 19: mod_base = OTHER; note = uracil
  modified_base 23: mod_base = OTHER; note = uracil
  source 1..23: mol_type = other DNA
tgccactgtagaaaggcatgatt

SEQ ID NO: 411 - DNA, 23 bp, synthetic construct
  misc_feature 1..23: note = Synthetic oligonucleotide
  modified_base 7: mod_base = OTHER; note = uracil
  modified_base 9: mod_base = OTHER; note = uracil
  modified_base 19: mod_base = OTHER; note = uracil
  modified_base 23: mod_base = OTHER; note = uracil
  source 1..23: mol_type = other DNA
tgccactgtagaaaggcatgatt

SEQ ID NO: 412 - DNA, 23 bp, synthetic construct
  misc_feature 1..23: note = Synthetic oligonucleotide
  modified_base 7: mod_base = OTHER; note = uracil
  modified_base 9: mod_base = OTHER; note = uracil
  modified_base 19: mod_base = OTHER; note = uracil
  modified_base 23: mod_base = OTHER; note = uracil
  source 1..23: mol_type = other DNA
tgccactgtagaaaggcatgatt

SEQ ID NO: 413 - DNA, 23 bp, synthetic construct
  misc_feature 1..23: note = Synthetic oligonucleotide
  modified_base 7: mod_base = OTHER; note = uracil
  modified_base 9: mod_base = OTHER; note = uracil
  modified_base 19: mod_base = OTHER; note = uracil
  modified_base 23: mod_base = OTHER; note = uracil
  source 1..23: mol_type = other DNA
tgccactgtagaaaggcatgatt

SEQ ID NO: 414 - DNA, 23 bp, synthetic construct
  misc_feature 1..23: note = Synthetic oligonucleotide
  modified_base 7: mod_base = OTHER; note = uracil
  modified_base 9: mod_base = OTHER; note = uracil
  modified_base 19: mod_base = OTHER; note = uracil
  modified_base 23: mod_base = OTHER; note = uracil
  source 1..23: mol_type = other DNA
tgccactgtagaaaggcatgatt

SEQ ID NO: 415 - DNA, 23 bp, synthetic construct
  misc_feature 1..23: note = Synthetic oligonucleotide
  modified_base 7: mod_base = OTHER; note = uracil
  modified_base 9: mod_base = OTHER; note = uracil
  modified_base 19: mod_base = OTHER; note = uracil
  modified_base 23: mod_base = OTHER; note = uracil
  source 1..23: mol_type = other DNA
tgccactgtagaaaggcatgatt

SEQ ID NO: 416 - DNA, 23 bp, synthetic construct
  misc_feature 1..23: note = Synthetic oligonucleotide
  modified_base 7: mod_base = OTHER; note = uracil
  modified_base 9: mod_base = OTHER; note = uracil
  modified_base 19: mod_base = OTHER; note = uracil
  modified_base 23: mod_base = OTHER; note = uracil
  source 1..23: mol_type = other DNA
tgccactgtagaaaggcatgatt

SEQ ID NO: 417 - DNA, 23 bp, synthetic construct
  misc_feature 1..23: note = Synthetic oligonucleotide
  modified_base 7: mod_base = OTHER; note = uracil
  modified_base 9: mod_base = OTHER; note = uracil
  modified_base 19: mod_base = OTHER; note = uracil
  modified_base 23: mod_base = OTHER; note = uracil
  source 1..23: mol_type = other DNA
tgccactgtagaaaggcatgatt

SEQ ID NO: 418 - DNA, 23 bp, synthetic construct
  misc_feature 1..23: note = Synthetic oligonucleotide
  modified_base 7: mod_base = OTHER; note = uracil
  modified_base 9: mod_base = OTHER; note = uracil
  modified_base 23: mod_base = OTHER; note = uracil
  source 1..23: mol_type = other DNA
tgccactgtagaaaggcatgatt

SEQ ID NO: 419 - DNA, 23 bp, synthetic construct
  misc_feature 1..23: note = Synthetic oligonucleotide
  modified_base 7: mod_base = OTHER; note = uracil
  modified_base 9: mod_base = OTHER; note = uracil
  modified_base 19: mod_base = OTHER; note = uracil
  modified_base 23: mod_base = OTHER; note = uracil
  source 1..23: mol_type = other DNA
tgccactgtagaaaggcatgatt

SEQ ID NO: 420 - DNA, 23 bp, synthetic construct
  misc_feature 1..23: note = Synthetic oligonucleotide
  modified_base 7: mod_base = OTHER; note = uracil
  modified_base 9: mod_base = OTHER; note = uracil
  modified_base 19: mod_base = OTHER; note = uracil
  modified_base 23: mod_base = OTHER; note = uracil
  source 1..23: mol_type = other DNA
tgccactgtagaaaggcatgatt

SEQ ID NO: 421 - DNA, 23 bp, synthetic construct
  misc_feature 1..23: note = Synthetic oligonucleotide
  modified_base 7: mod_base = OTHER; note = uracil
  modified_base 9: mod_base = OTHER; note = uracil
  modified_base 19: mod_base = OTHER; note = uracil
  modified_base 23: mod_base = OTHER; note = uracil
  source 1..23: mol_type = other DNA
tgccactgtagaaaggcatgatt

SEQ ID NO: 422 - DNA, 23 bp, synthetic construct
  misc_feature 1..23: note = Synthetic oligonucleotide
  modified_base 7: mod_base = OTHER; note = uracil
  modified_base 9: mod_base = OTHER; note = uracil
  modified_base 19: mod_base = OTHER; note = uracil
  modified_base 23: mod_base = OTHER; note = uracil
  source 1..23: mol_type = other DNA
agccactgtagaaaggcatgatt

SEQ ID NO: 423 - DNA, 23 bp, synthetic construct
  misc_feature 1..23: note = Synthetic oligonucleotide
  modified_base 7: mod_base = OTHER; note = uracil
  modified_base 9: mod_base = OTHER; note = uracil
  modified_base 19: mod_base = OTHER; note = uracil
  modified_base 23: mod_base = OTHER; note = uracil
  source 1..23: mol_type = other DNA
ggccactgtagaaaggcatgatt

SEQ ID NO: 424 - DNA, 23 bp, synthetic construct
  misc_feature 1..23: note = Synthetic oligonucleotide
  modified_base 7: mod_base = OTHER; note = uracil
  modified_base 9: mod_base = OTHER; note = uracil
  modified_base 19: mod_base = OTHER; note = uracil
  modified_base 23: mod_base = OTHER; note = uracil
  source 1..23: mol_type = other DNA
cgccactgtagaaaggcatgatt

SEQ ID NO: 425 - DNA, 23 bp, synthetic construct
  misc_feature 1..23: note = Synthetic oligonucleotide
  modified_base 7: mod_base = OTHER; note = uracil
  modified_base 9: mod_base = OTHER; note = uracil
  modified_base 19: mod_base = OTHER; note = uracil
  modified_base 23: mod_base = OTHER; note = uracil
  source 1..23: mol_type = other DNA
tgccactgtagaaaggcatgatt

SEQ ID NO: 426 - DNA, 23 bp, synthetic construct
  misc_feature 1..23: note = Synthetic oligonucleotide
  modified_base 9: mod_base = OTHER; note = uracil
  modified_base 19: mod_base = OTHER; note = uracil
  modified_base 23: mod_base = OTHER; note = uracil
  source 1..23: mol_type = other DNA
tgccactgtagaaaggcatgatt

SEQ ID NO: 427 - DNA, 23 bp, synthetic construct
  misc_feature 1..23: note = Synthetic oligonucleotide
  modified_base 9: mod_base = OTHER; note = uracil
  modified_base 19: mod_base = OTHER; note = uracil
  modified_base 23: mod_base = OTHER; note = uracil
  source 1..23: mol_type = other DNA
tgccactgtagaaaggcatgatt

SEQ ID NO: 428 - DNA, 23 bp, synthetic construct
  misc_feature 1..23: note = Synthetic oligonucleotide
  modified_base 9: mod_base = OTHER; note = uracil
  modified_base 19: mod_base = OTHER; note = uracil
  modified_base 23: mod_base = OTHER; note = uracil
  source 1..23: mol_type = other DNA
tgccactgtagaaaggcatgatt

SEQ ID NO: 429 - DNA, 23 bp, synthetic construct
  misc_feature 1..23: note = Synthetic oligonucleotide
  modified_base 7: mod_base = OTHER; note = uracil
  modified_base 9: mod_base = OTHER; note = uracil
  modified_base 19: mod_base = OTHER; note = uracil
  modified_base 23: mod_base = OTHER; note = uracil
  source 1..23: mol_type = other DNA
tgccactgtagaaaggcatgatt

SEQ ID NO: 430 - DNA, 23 bp, synthetic construct
  misc_feature 1..23: note = Synthetic oligonucleotide
  modified_base 7: mod_base = OTHER; note = uracil
  modified_base 9: mod_base = OTHER; note = uracil
  modified_base 19: mod_base = OTHER; note = uracil
  modified_base 23: mod_base = OTHER; note = uracil
  source 1..23: mol_type = other DNA
tgccactgtagaaaggcatgatt

SEQ ID NO: 431 - DNA, 23 bp, synthetic construct
  misc_feature 1..23: note = Synthetic oligonucleotide
  modified_base 7: mod_base = OTHER; note = uracil
  modified_base 9: mod_base = OTHER; note = uracil
  modified_base 19: mod_base = OTHER; note = uracil
  modified_base 23: mod_base = OTHER; note = uracil
  source 1..23: mol_type = other DNA
tgccactgtagaaaggcatgatt

SEQ ID NO: 432 - DNA, 23 bp, synthetic construct
  misc_feature 1..23: note = Synthetic oligonucleotide
  modified_base 9: mod_base = OTHER; note = uracil
  modified_base 19: mod_base = OTHER; note = uracil
  modified_base 23: mod_base = OTHER; note = uracil
  source 1..23: mol_type = other DNA
tgccactgtagaaaggcatgatt

SEQ ID NO: 433 - DNA, 23 bp, synthetic construct
  misc_feature 1..23: note = Synthetic oligonucleotide
  modified_base 7: mod_base = OTHER; note = uracil
  modified_base 19: mod_base = OTHER; note = uracil
  modified_base 23: mod_base = OTHER; note = uracil
  source 1..23: mol_type = other DNA
tgccactgtagaaaggcatgatt

SEQ ID NO: 434 - DNA, 23 bp, synthetic construct
  misc_feature 1..23: note = Synthetic oligonucleotide
  modified_base 7: mod_base = OTHER; note = uracil
  modified_base 9: mod_base = OTHER; note = uracil
  modified_base 19: mod_base = OTHER; note = uracil
  modified_base 23: mod_base = OTHER; note = uracil
  source 1..23: mol_type = other DNA
tgccactgtagaaaggcatgatt

SEQ ID NO: 435 - DNA, 23 bp, synthetic construct
  misc_feature 1..23: note = Synthetic oligonucleotide
  modified_base 7: mod_base = OTHER; note = uracil
  modified_base 9: mod_base = OTHER; note = uracil
  modified_base 19: mod_base = OTHER; note = uracil
  modified_base 23: mod_base = OTHER; note = uracil
  source 1..23: mol_type = other DNA
tgccactgtagaaaggcatgatt

SEQ ID NO: 436 - DNA, 23 bp, synthetic construct
  misc_feature 1..23: note = Synthetic oligonucleotide
  modified_base 7: mod_base = OTHER; note = uracil
  modified_base 9: mod_base = OTHER; note = uracil
  modified_base 19: mod_base = OTHER; note = uracil
  modified_base 23: mod_base = OTHER; note = uracil
  source 1..23: mol_type = other DNA
tgccactgtagaaaggcatgatt

SEQ ID NO: 437 - DNA, 23 bp, synthetic construct
  misc_feature 1..23: note = Synthetic oligonucleotide
  modified_base 7: mod_base = OTHER; note = uracil
  modified_base 9: mod_base = OTHER; note = uracil
  modified_base 19: mod_base = OTHER; note = uracil
  modified_base 23: mod_base = OTHER; note = uracil
  source 1..23: mol_type = other DNA
tgccactgtagaaaggcatgatt

SEQ ID NO: 438 - DNA, 23 bp, synthetic construct
  misc_feature 1..23: note = Synthetic oligonucleotide
  modified_base 7: mod_base = OTHER; note = uracil
  modified_base 9: mod_base = OTHER; note = uracil
  modified_base 19: mod_base = OTHER; note = uracil
  modified_base 23: mod_base = OTHER; note = uracil
  source 1..23: mol_type = other DNA
tgccactgtagaaaggcatgatt

SEQ ID NO: 439 - DNA, 23 bp, synthetic construct
  misc_feature 1..23: note = Synthetic oligonucleotide
  modified_base 7: mod_base = OTHER; note = uracil
  modified_base 9: mod_base = OTHER; note = uracil
  modified_base 19: mod_base = OTHER; note = uracil
  modified_base 23: mod_base = OTHER; note = uracil
  source 1..23: mol_type = other DNA
tgccactgtagaaaggcatgatt

SEQ ID NO: 440 - DNA, 23 bp, synthetic construct
  misc_feature 1..23: note = Synthetic oligonucleotide
  modified_base 7: mod_base = OTHER; note = uracil
  modified_base 9: mod_base = OTHER; note = uracil
  modified_base 19: mod_base = OTHER; note = uracil
  modified_base 23: mod_base = OTHER; note = uracil
  source 1..23: mol_type = other DNA
tgccactgtagaaaggcatgatt

SEQ ID NO: 441 - DNA, 23 bp, synthetic construct
  misc_feature 1..23: note = Synthetic oligonucleotide
  modified_base 7: mod_base = OTHER; note = uracil
  modified_base 9: mod_base = OTHER; note = uracil
  modified_base 19: mod_base = OTHER; note = uracil
  modified_base 23: mod_base = OTHER; note = uracil
  source 1..23: mol_type = other DNA
tgccactgtagaaaggcatgatt

SEQ ID NO: 442 - DNA, 23 bp, synthetic construct
  misc_feature 1..23: note = Synthetic oligonucleotide
  modified_base 7: mod_base = OTHER; note = uracil
  modified_base 9: mod_base = OTHER; note = uracil
  modified_base 19: mod_base = OTHER; note = uracil
  modified_base 23: mod_base = OTHER; note = uracil
  source 1..23: mol_type = other DNA
tgccactgtagaaaggcatgatt

SEQ ID NO: 443 - DNA, 23 bp, synthetic construct
  misc_feature 1..23: note = Synthetic oligonucleotide
  modified_base 7: mod_base = OTHER; note = uracil
  modified_base 9: mod_base = OTHER; note = uracil
  modified_base 23: mod_base = OTHER; note = uracil
  source 1..23: mol_type = other DNA
tgccactgtagaaaggcatgatt

SEQ ID NO: 444 - DNA, 23 bp, synthetic construct
  misc_feature 1..23: note = Synthetic oligonucleotide
  modified_base 7: mod_base = OTHER; note = uracil
  modified_base 9: mod_base = OTHER; note = uracil
  modified_base 19: mod_base = OTHER; note = uracil
  modified_base 23: mod_base = OTHER; note = uracil
  source 1..23: mol_type = other DNA
tgccactgtagaaaggcatgatt

SEQ ID NO: 445 - DNA, 23 bp, synthetic construct
  misc_feature 1..23: note = Synthetic oligonucleotide
  modified_base 7: mod_base = OTHER; note = uracil
  modified_base 9: mod_base = OTHER; note = uracil
  modified_base 19: mod_base = OTHER; note = uracil
  modified_base 23: mod_base = OTHER; note = uracil
  source 1..23: mol_type = other DNA
tgccactgtagaaaggcatgatt

SEQ ID NO: 446 - DNA, 23 bp, synthetic construct
  misc_feature 1..23: note = Synthetic oligonucleotide
  modified_base 7: mod_base = OTHER; note = uracil
  modified_base 9: mod_base = OTHER; note = uracil
  modified_base 19: mod_base = OTHER; note = uracil
  modified_base 23: mod_base = OTHER; note = uracil
  source 1..23: mol_type = other DNA
agccactgtagaaaggcatgatt

SEQ ID NO: 447 - DNA, 23 bp, synthetic construct
  misc_feature 1..23: note = Synthetic oligonucleotide
  modified_base 7: mod_base = OTHER; note = uracil
  modified_base 9: mod_base = OTHER; note = uracil
  modified_base 19: mod_base = OTHER; note = uracil
  modified_base 23: mod_base = OTHER; note = uracil
  source 1..23: mol_type = other DNA
ggccactgtagaaaggcatgatt

SEQ ID NO: 448 - DNA, 23 bp, synthetic construct
  misc_feature 1..23: note = Synthetic oligonucleotide
  modified_base 7: mod_base = OTHER; note = uracil
  modified_base 9: mod_base = OTHER; note = uracil
  modified_base 19: mod_base = OTHER; note = uracil
  modified_base 23: mod_base = OTHER; note = uracil
  source 1..23: mol_type = other DNA
cgccactgtagaaaggcatgatt

SEQ ID NO: 449 - DNA, 23 bp, synthetic construct
  misc_feature 1..23: note = Synthetic oligonucleotide
  modified_base 7: mod_base = OTHER; note = uracil
  modified_base 9: mod_base = OTHER; note = uracil
  modified_base 19: mod_base = OTHER; note = uracil
  modified_base 23: mod_base = OTHER; note = uracil
  source 1..23: mol_type = other DNA
tgccactgtagaaaggcatgatt

SEQ ID NO: 450 - DNA, 23 bp, synthetic construct
  misc_feature 1..23: note = Synthetic oligonucleotide
  modified_base 9: mod_base = OTHER; note = uracil
  modified_base 19: mod_base = OTHER; note = uracil
  modified_base 23: mod_base = OTHER; note = uracil
  source 1..23: mol_type = other DNA
tgccactgtagaaaggcatgatt

SEQ ID NO: 451 - DNA, 23 bp, synthetic construct
  misc_feature 1..23: note = Synthetic oligonucleotide
  modified_base 9: mod_base = OTHER; note = uracil
  modified_base 19: mod_base = OTHER; note = uracil
  modified_base 23: mod_base = OTHER; note = uracil
  source 1..23: mol_type = other DNA
tgccactgtagaaaggcatgatt

SEQ ID NO: 452 - DNA, 23 bp, synthetic construct
  misc_feature 1..23: note = Synthetic oligonucleotide
  modified_base 9: mod_base = OTHER; note = uracil
  modified_base 19: mod_base = OTHER; note = uracil
  modified_base 23: mod_base = OTHER; note = uracil
  source 1..23: mol_type = other DNA
tgccactgtagaaaggcatgatt

SEQ ID NO: 453 - DNA, 23 bp, synthetic construct
  misc_feature 1..23: note = Synthetic oligonucleotide
  modified_base 7: mod_base = OTHER; note = uracil
  modified_base 9: mod_base = OTHER; note = uracil
  modified_base 23: mod_base = OTHER; note = uracil
  source 1..23: mol_type = other DNA
tgccactgtagaaaggcatgatt

SEQ ID NO: 454 - DNA, 23 bp, synthetic construct
  misc_feature 1..23: note = Synthetic oligonucleotide
  modified_base 7: mod_base = OTHER; note = uracil
  modified_base 9: mod_base = OTHER; note = uracil
  modified_base 23: mod_base = OTHER; note = uracil
  source 1..23: mol_type = other DNA
tgccactgtagaaaggcatgatt

SEQ ID NO: 455 - DNA, 23 bp, synthetic construct
  misc_feature 1..23: note = Synthetic oligonucleotide
  modified_base 3: mod_base = OTHER; note = uracil
  modified_base 7: mod_base = OTHER; note = uracil
  modified_base 9: mod_base = OTHER; note = uracil
  modified_base 19: mod_base = OTHER; note = uracil
  modified_base 23: mod_base = OTHER; note = uracil
  source 1..23: mol_type = other DNA
tgtcactgtagaaaggcatgatt

SEQ ID NO: 456 - DNA, 23 bp, synthetic construct
  misc_feature 1..23: note = Synthetic oligonucleotide
  modified_base 4: mod_base = OTHER; note = uracil
  modified_base 7: mod_base = OTHER; note = uracil
  modified_base 9: mod_base = OTHER; note = uracil
  modified_base 19: mod_base = OTHER; note = uracil
  modified_base 23: mod_base = OTHER; note = uracil
  source 1..23: mol_type = other DNA
tgctactgtagaaaggcatgatt

SEQ ID NO: 457 - DNA, 23 bp, synthetic construct
  misc_feature 1..23: note = Synthetic oligonucleotide
  modified_base 7: mod_base = OTHER; note = uracil
  modified_base 9: mod_base = OTHER; note = uracil
  modified_base 19: mod_base = OTHER; note = uracil
  modified_base 23: mod_base = OTHER; note = uracil
  source 1..23: mol_type = other DNA
tgccgctgtagaaaggcatgatt

SEQ ID NO: 458 - DNA, 23 bp, synthetic construct
  misc_feature 1..23: note = Synthetic oligonucleotide
  modified_base 6..7: mod_base = OTHER; note = uracil
  modified_base 9: mod_base = OTHER; note = uracil
  modified_base 19: mod_base = OTHER; note = uracil
  modified_base 23: mod_base = OTHER; note = uracil
  source 1..23: mol_type = other DNA
tgccattgtagaaaggcatgatt

SEQ ID NO: 459 - DNA, 23 bp, synthetic construct
  misc_feature 1..23: note = Synthetic oligonucleotide
  modified_base 7: mod_base = OTHER; note = uracil
  modified_base 9: mod_base = OTHER; note = uracil
  modified_base 19: mod_base = OTHER; note = uracil
  modified_base 23: mod_base = OTHER; note = uracil
  source 1..23: mol_type = other DNA
tgccactgtggaaaggcatgatt

SEQ ID NO: 460 - DNA, 23 bp, synthetic construct
  misc_feature 1..23: note = Synthetic oligonucleotide
  modified_base 7: mod_base = OTHER; note = uracil
  modified_base 9: mod_base = OTHER; note = uracil
  modified_base 19: mod_base = OTHER; note = uracil
  modified_base 23: mod_base = OTHER; note = uracil
  source 1..23: mol_type = other DNA
tgccactgtaggaaggcatgatt

SEQ ID NO: 461 - DNA, 23 bp, synthetic construct
  misc_feature 1..23: note = Synthetic oligonucleotide
  modified_base 7: mod_base = OTHER; note = uracil
  modified_base 9: mod_base = OTHER; note = uracil
  modified_base 19: mod_base = OTHER; note = uracil
  modified_base 23: mod_base = OTHER; note = uracil
  source 1..23: mol_type = other DNA
tgccactgtagagaggcatgatt

SEQ ID NO: 462 - DNA, 23 bp, synthetic construct
  misc_feature 1..23: note = Synthetic oligonucleotide
  modified_base 7: mod_base = OTHER; note = uracil
  modified_base 9: mod_base = OTHER; note = uracil
  modified_base 19: mod_base = OTHER; note = uracil
  modified_base 23: mod_base = OTHER; note = uracil
  source 1..23: mol_type = other DNA
tgccactgtagaagggcatgatt

SEQ ID NO: 463 - DNA, 23 bp, synthetic construct
  misc_feature 1..23: note = Synthetic oligonucleotide
  modified_base 7: mod_base = OTHER; note = uracil
  modified_base 9: mod_base = OTHER; note = uracil
  modified_base 17: mod_base = OTHER; note = uracil
  modified_base 19: mod_base = OTHER; note = uracil
  modified_base 23: mod_base = OTHER; note = uracil
  source 1..23: mol_type = other DNA
tgccactgtagaaaggtatgatt

SEQ ID NO: 464 - DNA, 23 bp, synthetic construct
  misc_feature 1..23: note = Synthetic oligonucleotide
  modified_base 7: mod_base = OTHER; note = uracil
  modified_base 9: mod_base = OTHER; note = uracil
  modified_base 19: mod_base = OTHER; note = uracil
  modified_base 23: mod_base = OTHER; note = uracil
  source 1..23: mol_type = other DNA
tgccactgtagaaaggcgtgatt

SEQ ID NO: 465 - DNA, 23 bp, synthetic construct
  misc_feature 1..23: note = Synthetic oligonucleotide
  modified_base 7: mod_base = OTHER; note = uracil
  modified_base 9: mod_base = OTHER; note = uracil
  modified_base 19: mod_base = OTHER; note = uracil
  modified_base 23: mod_base = OTHER; note = uracil
  source 1..23: mol_type = other DNA
tgccactgtagaaaggcatggtt

SEQ ID NO: 466 - DNA, 20 bp, synthetic construct
  misc_feature 1..20: note = Synthetic oligonucleotide
  modified_base 4: mod_base = OTHER; note = uracil
  source 1..20: mol_type = other DNA
acctgaggatggaccgcggg

SEQ ID NO: 467 - DNA, 20 bp, synthetic construct
  misc_feature 1..20: note = Description of Artificial Sequence: Synthetic oligonucleotide
  source 1..20: mol_type = other DNA
acctgaggatggaccgcggg

SEQ ID NO: 468 - DNA, 20 bp, synthetic construct
  misc_feature 1..20: note = Description of Artificial Sequence: Synthetic oligonucleotide
  source 1..20: mol_type = other DNA
ggacctgaggatggaccgcg

SEQ ID NO: 469 - DNA, 20 bp, synthetic construct
  misc_feature 1..20: note = Description of Artificial Sequence: Synthetic oligonucleotide
  source 1..20: mol_type = other DNA
ggacctgaggatggaccgcg

SEQ ID NO: 470 - DNA, 20 bp, synthetic construct
  misc_feature 1..20: note = Synthetic oligonucleotide
  modified_base 4: mod_base = OTHER; note = uracil
  source 1..20: mol_type = other DNA
acctgaggatggaccgcggg

SEQ ID NO: 471 - DNA, 20 bp, synthetic construct
  misc_feature 1..20: note = Description of Artificial Sequence: Synthetic oligonucleotide
  source 1..20: mol_type = other DNA
acctgaggatggaccgcggg

SEQ ID NO: 472 - DNA, 20 bp, synthetic construct
  misc_feature 1..20: note = Description of Artificial Sequence: Synthetic oligonucleotide
  source 1..20: mol_type = other DNA
ggacctgaggatggaccgcg

SEQ ID NO: 473 - DNA, 20 bp, synthetic construct
  misc_feature 1..20: note = Description of Artificial Sequence: Synthetic oligonucleotide
  source 1..20: mol_type = other DNA
ggacctgaggatggaccgcg

SEQ ID NO: 474 - DNA, 20 bp, synthetic construct
  misc_feature 1..20: note = Synthetic oligonucleotide
  modified_base 4: mod_base = OTHER; note = uracil
  source 1..20: mol_type = other DNA
acctgaggatggaccgcggg

SEQ ID NO: 475 - DNA, 20 bp, synthetic construct
  misc_feature 1..20: note = Description of Artificial Sequence: Synthetic oligonucleotide
  source 1..20: mol_type = other DNA
acctgaggatggaccgcggg

SEQ ID NO: 476 - DNA, 20 bp, synthetic construct
  misc_feature 1..20: note = Description of Artificial Sequence: Synthetic oligonucleotide
  source 1..20: mol_type = other DNA
ggacctgaggatggaccgcg

SEQ ID NO: 477 - DNA, 20 bp, synthetic construct
  misc_feature 1..20: note = Description of Artificial Sequence: Synthetic oligonucleotide
  source 1..20: mol_type = other DNA
ggacctgaggatggaccgcg

SEQ ID NO: 478 - DNA, 23 bp, synthetic construct
  misc_feature 1..23: note = Synthetic oligonucleotide
  modified_base 7: mod_base = OTHER; note = uracil
  modified_base 9: mod_base = OTHER; note = uracil
  modified_base 19: mod_base = OTHER; note = uracil
  modified_base 23: mod_base = OTHER; note = uracil
  source 1..23: mol_type = other DNA
tgccactgtagaaaggcatgatt

SEQ ID NO: 479 - DNA, 23 bp, synthetic construct
  misc_feature 1..23: note = Synthetic oligonucleotide
  modified_base 7: mod_base = OTHER; note = uracil
  modified_base 9: mod_base = OTHER; note = uracil
  modified_base 19: mod_base = OTHER; note = uracil
  modified_base 23: mod_base = OTHER; note = uracil
  source 1..23: mol_type = other DNA
tgccactgtagaaaggcatgatt

SEQ ID NO: 480 - DNA, 27 bp, synthetic construct
  misc_feature 1..27: note = Description of Artificial Sequence: Synthetic oligonucleotide
  source 1..27: mol_type = other DNA
cccccaggcaggagccaagcacagcag

SEQ ID NO: 481 - DNA, 23 bp, synthetic construct
  misc_feature 1..23: note = Synthetic oligonucleotide
  modified_base 7: mod_base = OTHER; note = uracil
  modified_base 9: mod_base = OTHER; note = uracil
  modified_base 19: mod_base = OTHER; note = uracil
  modified_base 23: mod_base = OTHER; note = uracil
  source 1..23: mol_type = other DNA
tgccactgtagaaaggcatgatt

SEQ ID NO: 482 - DNA, 23 bp, synthetic construct
  misc_feature 1..23: note = Synthetic oligonucleotide
  modified_base 7: mod_base = OTHER; note = uracil
  modified_base 9: mod_base = OTHER; note = uracil
  modified_base 19: mod_base = OTHER; note = uracil
  modified_base 23: mod_base = OTHER; note = uracil
  source 1..23: mol_type = other DNA
tgccactgtagaaaggcatgatt

SEQ ID NO: 483 - DNA, 23 bp, synthetic construct
  misc_feature 1..23: note = Synthetic oligonucleotide
  modified_base 7: mod_base = OTHER; note = uracil
  modified_base 9: mod_base = OTHER; note = uracil
  modified_base 19: mod_base = OTHER; note = uracil
  modified_base 23: mod_base = OTHER; note = uracil
  source 1..23: mol_type = other DNA
tgccactgtagaaaggcatgatt

SEQ ID NO: 484 - DNA, 23 bp, synthetic construct
  misc_feature 1..23: note = Synthetic oligonucleotide
  modified_base 7: mod_base = OTHER; note = uracil
  modified_base 9: mod_base = OTHER; note = uracil
  modified_base 19: mod_base = OTHER; note = uracil
  modified_base 23: mod_base = OTHER; note = uracil
  source 1..23: mol_type = other DNA
tgccactgtagaaaggcatgatt

SEQ ID NO: 485 - DNA, 23 bp, synthetic construct
  misc_feature 1..23: note = Synthetic oligonucleotide
  modified_base 7: mod_base = OTHER; note = uracil
  modified_base 9: mod_base = OTHER; note = uracil
  modified_base 19: mod_base = OTHER; note = uracil
  modified_base 23: mod_base = OTHER; note = uracil
  source 1..23: mol_type = other DNA
tgccactgtagaaaggcatgatt

SEQ ID NO: 486 - DNA, 23 bp, synthetic construct
  misc_feature 1..23: note = Synthetic oligonucleotide
  modified_base 7: mod_base = OTHER; note = uracil
  modified_base 9: mod_base = OTHER; note = uracil
  modified_base 19: mod_base = OTHER; note = uracil
  modified_base 23: mod_base = OTHER; note = uracil
  source 1..23: mol_type = other DNA
tgccactgtagaaaggcatgatt

SEQ ID NO: 487 - DNA, 23 bp, synthetic construct
  misc_feature 1..23: note = Synthetic oligonucleotide
  modified_base 7: mod_base = OTHER; note = uracil
  modified_base 9: mod_base = OTHER; note = uracil
  modified_base 19: mod_base = OTHER; note = uracil
  modified_base 23: mod_base = OTHER; note = uracil
  source 1..23: mol_type = other DNA
tgccactgtagaaaggcatgatt

SEQ ID NO: 488 - DNA, 23 bp, synthetic construct
  misc_feature 1..23: note = Synthetic oligonucleotide
  modified_base 7: mod_base = OTHER; note = uracil
  modified_base 9: mod_base = OTHER; note = uracil
  modified_base 19: mod_base = OTHER; note = uracil
  modified_base 23: mod_base = OTHER; note = uracil
  source 1..23: mol_type = other DNA
tgccactgtagaaaggcatgatt

SEQ ID NO: 489 - DNA, 23 bp, synthetic construct
  misc_feature 1..23: note = Synthetic oligonucleotide
  modified_base 7: mod_base = OTHER; note = uracil
  modified_base 9: mod_base = OTHER; note = uracil
  modified_base 19: mod_base = OTHER; note = uracil
  modified_base 23: mod_base = OTHER; note = uracil
  source 1..23: mol_type = other DNA
tgccactgtagaaaggcatgatt

SEQ ID NO: 490 - DNA, 23 bp, synthetic construct
  misc_feature 1..23: note = Synthetic oligonucleotide
  modified_base 7: mod_base = OTHER; note = uracil
  modified_base 9: mod_base = OTHER; note = uracil
  modified_base 19: mod_base = OTHER; note = uracil
  modified_base 23: mod_base = OTHER; note = uracil
  source 1..23: mol_type = other DNA
tgccactgtagaaaggcatgatt

SEQ ID NO: 491 - DNA, 23 bp, synthetic construct
  misc_feature 1..23: note = Synthetic oligonucleotide
  modified_base 7: mod_base = OTHER; note = uracil
  modified_base 9: mod_base = OTHER; note = uracil
  modified_base 19: mod_base = OTHER; note = uracil
  modified_base 23: mod_base = OTHER; note = uracil
  source 1..23: mol_type = other DNA
tgccactgtagaaaggcatgatt

SEQ ID NO: 492 - DNA, 23 bp, synthetic construct
  misc_feature 1..23: note = Synthetic oligonucleotide
  modified_base 7: mod_base = OTHER; note = uracil
  modified_base 9: mod_base = OTHER; note = uracil
  modified_base 19: mod_base = OTHER; note = uracil
  modified_base 23: mod_base = OTHER; note = uracil
  source 1..23: mol_type = other DNA
tgccactgtagaaaggcatgatt

SEQ ID NO: 493 - DNA, 23 bp, synthetic construct
  misc_feature 1..23: note = Synthetic oligonucleotide
  modified_base 7: mod_base = OTHER; note = uracil
  modified_base 9: mod_base = OTHER; note = uracil
  modified_base 19: mod_base = OTHER; note = uracil
  modified_base 23: mod_base = OTHER; note = uracil
  source 1..23: mol_type = other DNA
tgccactgtagaaaggcatgatt

SEQ ID NO: 494 - DNA, 23 bp, synthetic construct
  misc_feature 1..23: note = Synthetic oligonucleotide
  modified_base 7: mod_base = OTHER; note = uracil
  modified_base 9: mod_base = OTHER; note = uracil
  modified_base 19: mod_base = OTHER; note = uracil
  modified_base 23: mod_base = OTHER; note = uracil
  source 1..23: mol_type = other DNA
tgccactgtagaaaggcatgatt

SEQ ID NO: 495 - DNA, 23 bp, synthetic construct
  misc_feature 1..23: note = Synthetic oligonucleotide
  modified_base 7: mod_base = OTHER; note = uracil
  modified_base 9: mod_base = OTHER; note = uracil
  modified_base 19: mod_base = OTHER; note = uracil
  modified_base 23: mod_base = OTHER; note = uracil
  source 1..23: mol_type = other DNA
tgccactgtagaaaggcatgatt

SEQ ID NO: 496 - DNA, 23 bp, synthetic construct
  misc_feature 1..23: note = Synthetic oligonucleotide
  modified_base 7: mod_base = OTHER; note = uracil
  modified_base 9: mod_base = OTHER; note = uracil
  modified_base 19: mod_base = OTHER; note = uracil
  modified_base 23: mod_base = OTHER; note = uracil
  source 1..23: mol_type = other DNA
tgccactgtagaaaggcatgatt

SEQ ID NO: 497 - DNA, 23 bp, synthetic construct
  misc_feature 1..23: note = Synthetic oligonucleotide
  modified_base 7: mod_base = OTHER; note = uracil
  modified_base 9: mod_base = OTHER; note = uracil
  modified_base 19: mod_base = OTHER; note = uracil
  modified_base 23: mod_base = OTHER; note = uracil
  source 1..23: mol_type = other DNA
tgccactgtagaaaggcatgatt

SEQ ID NO: 498 - DNA, 23 bp, synthetic construct
  misc_feature 1..23: note = Synthetic oligonucleotide
  modified_base 7: mod_base = OTHER; note = uracil
  modified_base 9: mod_base = OTHER; note = uracil
  modified_base 19: mod_base = OTHER; note = uracil
  modified_base 23: mod_base = OTHER; note = uracil
  source 1..23: mol_type = other DNA
tgccactgtagaaaggcatgatt

SEQ ID NO: 499 - DNA, 23 bp, synthetic construct
  misc_feature 1..23: note = Synthetic oligonucleotide
  modified_base 7: mod_base = OTHER; note = uracil
  modified_base 9: mod_base = OTHER; note = uracil
  modified_base 19: mod_base = OTHER; note = uracil
  modified_base 23: mod_base = OTHER; note = uracil
  source 1..23: mol_type = other DNA
tgccactgtagaaaggcatgatt

SEQ ID NO: 500 - DNA, 23 bp, synthetic construct
  misc_feature 1..23: note = Synthetic oligonucleotide
  modified_base 7: mod_base = OTHER; note = uracil
  modified_base 9: mod_base = OTHER; note = uracil
  modified_base 19: mod_base = OTHER; note = uracil
  modified_base 23: mod_base = OTHER; note = uracil
  source 1..23: mol_type = other DNA
tgccactgtagaaaggcatgatt

SEQ ID NO: 501 - DNA, 23 bp, synthetic construct
  misc_feature 1..23: note = Synthetic oligonucleotide
  modified_base 7: mod_base = OTHER; note = uracil
  modified_base 9: mod_base = OTHER; note = uracil
  modified_base 19: mod_base = OTHER; note = uracil
  modified_base 23: mod_base = OTHER; note = uracil
  source 1..23: mol_type = other DNA
tgccactgtagaaaggcatgatt

SEQ ID NO: 502 - DNA, 23 bp, synthetic construct
  misc_feature 1..23: note = Synthetic oligonucleotide
  modified_base 7: mod_base = OTHER; note = uracil
  modified_base 9: mod_base = OTHER; note = uracil
  modified_base 19: mod_base = OTHER; note = uracil
  modified_base 23: mod_base = OTHER; note = uracil
  source 1..23: mol_type = other DNA
tgccactgtagaaaggcatgatt

SEQ ID NO: 503 - DNA, 23 bp, synthetic construct
  misc_feature 1..23: note = Synthetic oligonucleotide
  modified_base 7: mod_base = OTHER; note = uracil
  modified_base 9: mod_base = OTHER; note = uracil
  modified_base 19: mod_base = OTHER; note = uracil
  modified_base 23: mod_base = OTHER; note = uracil
  source 1..23: mol_type = other DNA
tgccactgtagaaaggcatgatt

SEQ ID NO: 504 - DNA, 23 bp, synthetic construct
  misc_feature 1..23: note = Synthetic oligonucleotide
  modified_base 7: mod_base = OTHER; note = uracil
  modified_base 9: mod_base = OTHER; note = uracil
  modified_base 19: mod_base = OTHER; note = uracil
  modified_base 23: mod_base = OTHER; note = uracil
  source 1..23: mol_type = other DNA
tgccactgtagaaaggcatgatt

SEQ ID NO: 505 - DNA, 23 bp, synthetic construct
  misc_feature 1..23: note = Synthetic oligonucleotide
  modified_base 7: mod_base = OTHER; note = uracil
  modified_base 9: mod_base = OTHER; note = uracil
  modified_base 19: mod_base = OTHER; note = uracil
  modified_base 23: mod_base = OTHER; note = uracil
  source 1..23: mol_type = other DNA
tgccactgtagaaaggcatgatt

SEQ ID NO: 506 - DNA, 23 bp, synthetic construct
  misc_feature 1..23: note = Synthetic oligonucleotide
  modified_base 7: mod_base = OTHER; note = uracil
  modified_base 9: mod_base = OTHER; note = uracil
  modified_base 19: mod_base = OTHER; note = uracil
  modified_base 23: mod_base = OTHER; note = uracil
  source 1..23: mol_type = other DNA
tgccactgtagaaaggcatgatt

SEQ ID NO: 507 - DNA, 23 bp, synthetic construct
  misc_feature 1..23: note = Synthetic oligonucleotide
  modified_base 7: mod_base = OTHER; note = uracil
  modified_base 9: mod_base = OTHER; note = uracil
  modified_base 19: mod_base = OTHER; note = uracil
  modified_base 23: mod_base = OTHER; note = uracil
  source 1..23: mol_type = other DNA
tgccactgtagaaaggcatgatt

SEQ ID NO: 508 - DNA, 23 bp, synthetic construct
  misc_feature 1..23: note = Synthetic oligonucleotide
  modified_base 7: mod_base = OTHER; note = uracil
  modified_base 9: mod_base = OTHER; note = uracil
  modified_base 19: mod_base = OTHER; note = uracil
  modified_base 23: mod_base = OTHER; note = uracil
  source 1..23: mol_type = other DNA
tgccactgtagaaaggcatgatt

SEQ ID NO: 509 - DNA, 21 bp, synthetic construct
  misc_feature 1..21: note = Synthetic oligonucleotide
  modified_base 7: mod_base = OTHER; note = uracil
  modified_base 9: mod_base = OTHER; note = uracil
  modified_base 19: mod_base = OTHER; note = uracil
  modified_base 21: mod_base = OTHER; note = uracil
  source 1..21: mol_type = other DNA
tgccactgtagaaaggcattt

SEQ ID NO: 510 - DNA, 21 bp, synthetic construct
  misc_feature 1..21: note = Synthetic oligonucleotide
  modified_base 7: mod_base = OTHER; note = uracil
  modified_base 9: mod_base = OTHER; note = uracil
  modified_base 19: mod_base = OTHER; note = uracil
  modified_base 21: mod_base = OTHER; note = uracil
  source 1..21: mol_type = other DNA
tgccactgtagaaaggcattt

SEQ ID NO: 511 - DNA, 21 bp, synthetic construct
  misc_feature 1..21: note = Synthetic oligonucleotide
  modified_base 7: mod_base = OTHER; note = uracil
  modified_base 9: mod_base = OTHER; note = uracil
  modified_base 19: mod_base = OTHER; note = uracil
  modified_base 21: mod_base = OTHER; note = uracil
  source 1..21: mol_type = other DNA
tgccactgtagaaaggcattt

SEQ ID NO: 512 - DNA, 21 bp, synthetic construct
  misc_feature 1..21: note = Synthetic oligonucleotide
  modified_base 7: mod_base = OTHER; note = uracil
  modified_base 9: mod_base = OTHER; note = uracil
  modified_base 14: mod_base = OTHER; note = uracil
  modified_base 19: mod_base = OTHER; note = uracil
  modified_base 21: mod_base = OTHER; note = uracil
  source 1..21: mol_type = other DNA
tgccactgtagaatggcattt

SEQ ID NO: 513 - DNA, 21 bp, synthetic construct
  misc_feature 1..21: note = Synthetic oligonucleotide
  modified_base 7: mod_base = OTHER; note = uracil
  modified_base 9: mod_base = OTHER; note = uracil
  modified_base 19: mod_base = OTHER; note = uracil
  modified_base 21: mod_base = OTHER; note = uracil
  source 1..21: mol_type = other DNA
tgccactgtagaaacgcattt

SEQ ID NO: 514 - DNA, 21 bp, synthetic construct
  misc_feature 1..21: note = Synthetic oligonucleotide
  modified_base 7: mod_base = OTHER; note = uracil
  modified_base 9: mod_base = OTHER; note = uracil
  modified_base 19: mod_base = OTHER; note = uracil
  modified_base 21: mod_base = OTHER; note = uracil
  source 1..21: mol_type = other DNA
tgccactgtagaaagccattt

SEQ ID NO: 515 - DNA, 21 bp, synthetic construct
  misc_feature 1..21: note = Synthetic oligonucleotide
  modified_base 7: mod_base = OTHER; note = uracil
  modified_base 9: mod_base = OTHER; note = uracil
  modified_base 19: mod_base = OTHER; note = uracil
  modified_base 21: mod_base = OTHER; note = uracil
  source 1..21: mol_type = other DNA
tgccactgtagaaagggattt

SEQ ID NO: 516 - DNA, 21 bp, synthetic construct
  misc_feature 1..21: note = Synthetic oligonucleotide
  modified_base 7: mod_base = OTHER; note = uracil
  modified_base 9: mod_base = OTHER; note = uracil
  modified_base 18..19: mod_base = OTHER; note = uracil
  modified_base 21: mod_base = OTHER; note = uracil
  source 1..21: mol_type = other DNA
tgccactgtagaaaggctttt

SEQ ID NO: 517 - DNA, 21 bp, synthetic construct
  misc_feature 1..21: note = Synthetic oligonucleotide
  modified_base 7: mod_base = OTHER; note = uracil
  modified_base 9: mod_base = OTHER; note = uracil
  modified_base 21: mod_base = OTHER; note = uracil
  source 1..21: mol_type = other DNA
tgccactgtagaaaggcaatt

SEQ ID NO: 518 - DNA, 23 bp, synthetic construct
  misc_feature 1..23: note = Synthetic oligonucleotide
  modified_base 7: mod_base = OTHER; note = uracil
  modified_base 9: mod_base = OTHER; note = uracil
  modified_base 19: mod_base = OTHER; note = uracil
  modified_base 23: mod_base = OTHER; note = uracil
  source 1..23: mol_type = other DNA
tgccactgtagaaacgcatgatt

SEQ ID NO: 519 - DNA, 23 bp, synthetic construct
  misc_feature 1..23: note = Synthetic oligonucleotide
  modified_base 7: mod_base = OTHER; note = uracil
  modified_base 9: mod_base = OTHER; note = uracil
  modified_base 19: mod_base = OTHER; note = uracil
  modified_base 23: mod_base = OTHER; note = uracil
  source 1..23: mol_type = other DNA
tgccactgtagaaagccatgatt

SEQ ID NO: 520 - DNA, 23 bp, synthetic construct
  misc_feature 1..23: note = Synthetic oligonucleotide
  modified_base 7: mod_base = OTHER; note = uracil
  modified_base 9: mod_base = OTHER; note = uracil
  modified_base 18..19: mod_base = OTHER; note = uracil
  modified_base 23: mod_base = OTHER; note = uracil
  source 1..23: mol_type = other DNA
tgccactgtagaaaggcttgatt

SEQ ID NO: 521 - DNA, 23 bp, synthetic construct
  misc_feature 1..23: note = Synthetic oligonucleotide
  modified_base 7: mod_base = OTHER; note = uracil
  modified_base 9: mod_base = OTHER; note = uracil
  modified_base 23: mod_base = OTHER; note = uracil
  source 1..23: mol_type = other DNA
tgccactgtagaaaggcaagatt

SEQ ID NO: 522 - DNA, 23 bp, synthetic construct
  misc_feature 1..23: note = Synthetic oligonucleotide
  modified_base 7: mod_base = OTHER; note = uracil
  modified_base 9: mod_base = OTHER; note = uracil
  modified_base 19: mod_base = OTHER; note = uracil
  modified_base 23: mod_base = OTHER; note = uracil
  source 1..23: mol_type = other DNA
tgccactgtagaaaggcatcatt

SEQ ID NO: 523 - DNA, 23 bp, synthetic construct
  misc_feature 1..23: note = Synthetic oligonucleotide
  modified_base 7: mod_base = OTHER; note = uracil
  modified_base 9: mod_base = OTHER; note = uracil
  modified_base 19: mod_base = OTHER; note = uracil
  modified_base 21: mod_base = OTHER; note = uracil
  modified_base 23: mod_base = OTHER; note = uracil
  source 1..23: mol_type = other DNA
tgccactgtagaaaggcatgttt

SEQ ID NO: 524 - DNA, 20 bp, synthetic construct
  misc_feature 1..20: note = Synthetic oligonucleotide
  modified_base 1: mod_base = OTHER; note = uracil
  modified_base 3: mod_base = OTHER; note = uracil
  modified_base 18: mod_base = OTHER; note = uracil
  source 1..20: mol_type = other DNA
tgtgcttggctcctgcctgg

SEQ ID NO: 525 - DNA, 20 bp, synthetic construct
  misc_feature 1..20: note = Synthetic oligonucleotide
  modified_base 1: mod_base = OTHER; note = uracil
  modified_base 3..4: mod_base = OTHER; note = uracil
  modified_base 18: mod_base = OTHER; note = uracil
  source 1..20: mol_type = other DNA
tcttgttacccccgccatgg

SEQ ID NO: 526 - DNA, 20 bp, synthetic construct
  misc_feature 1..20: note = Synthetic oligonucleotide
  modified_base 19..20: mod_base = OTHER; note = uracil
  source 1..20: mol_type = other DNA
acccccgccatggagacgtt

SEQ ID NO: 527 - DNA, 20 bp, synthetic construct
  misc_feature 1..20: note = Synthetic oligonucleotide
  modified_base 1: mod_base = OTHER; note = uracil
  modified_base 20: mod_base = OTHER; note = uracil
  source 1..20: mol_type = other DNA
tacccccgccatggagacgt

SEQ ID NO: 528 - DNA, 20 bp, synthetic construct
  misc_feature 1..20: note = Synthetic oligonucleotide
  modified_base 2: mod_base = OTHER; note = uracil
  modified_base 16: mod_base = OTHER; note = uracil
  modified_base 19: mod_base = OTHER; note = uracil
  source 1..20: mol_type = other DNA
ctgcactgggcttcctggtg

SEQ ID NO: 529 - DNA, 20 bp, synthetic construct
  misc_feature 1..20: note = Synthetic oligonucleotide
  modified_base 1: mod_base = OTHER; note = uracil
  source 1..20: mol_type = other DNA
tggacctgaggatggaccgc

SEQ ID NO: 530 - DNA, 20 bp, synthetic construct
  misc_feature 1..20: note = Synthetic oligonucleotide
  modified_base 16: mod_base = OTHER; note = uracil
  source 1..20: mol_type = other DNA
agggaccctctgcactgggc

SEQ ID NO: 531 - DNA, 20 bp, synthetic construct
  misc_feature 1..20: note = Synthetic oligonucleotide
  modified_base 2..3: mod_base = OTHER; note = uracil
  modified_base 5: mod_base = OTHER; note = uracil
  modified_base 17: mod_base = OTHER; note = uracil
  source 1..20: mol_type = other DNA
cttgttacccccgccatgga

SEQ ID NO: 532 - DNA, 20 bp, synthetic construct
  misc_feature 1..20: note = Synthetic oligonucleotide
  modified_base 5: mod_base = OTHER; note = uracil
  modified_base 19: mod_base = OTHER; note = uracil
  source 1..20: mol_type = other DNA
aggctgggatcctccacgtc

SEQ ID NO: 533 - DNA, 20 bp, synthetic construct
  misc_feature 1..20: note = Synthetic oligonucleotide
  modified_base 17: mod_base = OTHER; note = uracil
  source 1..20: mol_type = other DNA
aagggaccctctgcactggg

SEQ ID NO: 534 - DNA, 20 bp, synthetic construct
  misc_feature 1..20: note = Description of Artificial Sequence: Synthetic oligonucleotide
  source 1..20: mol_type = other DNA
tgtgcttggctcctgcctgg

SEQ ID NO: 535 - DNA, 20 bp, synthetic construct
  misc_feature 1..20: note = Description of Artificial Sequence: Synthetic oligonucleotide
  source 1..20: mol_type = other DNA
tcttgttacccccgccatgg

SEQ ID NO: 536 - DNA, 20 bp, synthetic construct
  misc_feature 1..20: note = Description of Artificial Sequence: Synthetic oligonucleotide
  source 1..20: mol_type = other DNA
acccccgccatggagacgtt

SEQ ID NO: 537 - DNA, 20 bp, synthetic construct
  misc_feature 1..20: note = Description of Artificial Sequence: Synthetic oligonucleotide
  source 1..20: mol_type = other DNA
tacccccgccatggagacgt

SEQ ID NO: 538 - DNA, 20 bp, synthetic construct
  misc_feature 1..20: note = Description of Artificial Sequence: Synthetic oligonucleotide
  source 1..20: mol_type = other DNA
ctgcactgggcttcctggtg

SEQ ID NO: 539 - DNA, 20 bp, synthetic construct
  misc_feature 1..20: note = Description of Artificial Sequence: Synthetic oligonucleotide
  source 1..20: mol_type = other DNA
tggacctgaggatggaccgc

SEQ ID NO: 540 - DNA, 20 bp, synthetic construct
  misc_feature 1..20: note = Description of Artificial Sequence: Synthetic oligonucleotide
  source 1..20: mol_type = other DNA
agggaccctctgcactgggc

SEQ ID NO: 541 - DNA, 20 bp, synthetic construct
  misc_feature 1..20: note = Description of Artificial Sequence: Synthetic oligonucleotide
  source 1..20: mol_type = other DNA
cttgttacccccgccatgga

SEQ ID NO: 542 - DNA, 20 bp, synthetic construct
  misc_feature 1..20: note = Description of Artificial Sequence: Synthetic oligonucleotide
  source 1..20: mol_type = other DNA
aggctgggatcctccacgtc

SEQ ID NO: 543 - DNA, 20 bp, synthetic construct
  misc_feature 1..20: note = Description of Artificial Sequence: Synthetic oligonucleotide
  source 1..20: mol_type = other DNA
aagggaccctctgcactggg

SEQ ID NO: 544 - DNA, 20 bp, synthetic construct
  misc_feature 1..20: note = Synthetic oligonucleotide
  modified_base 1: mod_base = OTHER; note = uracil
  modified_base 3: mod_base = OTHER; note = uracil
  modified_base 18: mod_base = OTHER; note = uracil
  source 1..20: mol_type = other DNA
tgtgcttggctcctgcctgg

SEQ ID NO: 545 - DNA, 20 bp, synthetic construct
  misc_feature 1..20: note = Synthetic oligonucleotide
  modified_base 1: mod_base = OTHER; note = uracil
  modified_base 3..4: mod_base = OTHER; note = uracil
  modified_base 18: mod_base = OTHER; note = uracil
  source 1..20: mol_type = other DNA
tcttgttacccccgccatgg

SEQ ID NO: 546 - DNA, 20 bp, synthetic construct
  misc_feature 1..20: note = Synthetic oligonucleotide
  modified_base 19..20: mod_base = OTHER; note = uracil
  source 1..20: mol_type = other DNA
acccccgccatggagacgtt

SEQ ID NO: 547 - DNA, 20 bp, synthetic construct
  misc_feature 1..20: note = Synthetic oligonucleotide
  modified_base 1: mod_base = OTHER; note = uracil
  modified_base 20: mod_base = OTHER; note = uracil
  source 1..20: mol_type = other DNA
tacccccgccatggagacgt

SEQ ID NO: 548 - DNA, 20 bp, synthetic construct
  misc_feature 1..20: note = Synthetic oligonucleotide
  modified_base 2: mod_base = OTHER; note = uracil
  modified_base 16: mod_base = OTHER; note = uracil
  modified_base 19: mod_base = OTHER; note = uracil
  source 1..20: mol_type = other DNA
ctgcactgggcttcctggtg

SEQ ID NO: 549 - DNA, 20 bp, synthetic construct
  misc_feature 1..20: note = Synthetic oligonucleotide
  modified_base 1: mod_base = OTHER; note = uracil
  source 1..20: mol_type = other DNA
tggacctgaggatggaccgc

SEQ ID NO: 550 - DNA, 20 bp, synthetic construct
  misc_feature 1..20: note = Synthetic oligonucleotide
  modified_base 16: mod_base = OTHER; note = uracil
  source 1..20: mol_type = other DNA
agggaccctctgcactgggc

SEQ ID NO: 551 - DNA, 20 bp, synthetic construct
  misc_feature 1..20: note = Synthetic oligonucleotide
  modified_base 2..3: mod_base = OTHER; note = uracil
  modified_base 5: mod_base = OTHER; note = uracil
  modified_base 17: mod_base = OTHER; note = uracil
  source 1..20: mol_type = other DNA
cttgttacccccgccatgga

SEQ ID NO: 552 - DNA, 20 bp, synthetic construct
  misc_feature 1..20: note = Synthetic oligonucleotide
  modified_base 5: mod_base = OTHER; note = uracil
  modified_base 19: mod_base = OTHER; note = uracil
  source 1..20: mol_type = other DNA
aggctgggatcctccacgtc

SEQ ID NO: 553 - DNA, 20 bp, synthetic construct
  misc_feature 1..20: note = Synthetic oligonucleotide
  modified_base 17: mod_base = OTHER; note = uracil
  source 1..20: mol_type = other DNA
aagggaccctctgcactggg

SEQ ID NO: 554 - DNA, 20 bp, synthetic construct
  misc_feature 1..20: note = Description of Artificial Sequence: Synthetic oligonucleotide
  source 1..20: mol_type = other DNA
tgtgcttggctcctgcctgg

SEQ ID NO: 555 - DNA, 20 bp, synthetic construct
  misc_feature 1..20: note = Description of Artificial Sequence: Synthetic oligonucleotide
  source 1..20: mol_type = other DNA
tcttgttacccccgccatgg

SEQ ID NO: 556 - DNA, 20 bp, synthetic construct
  misc_feature 1..20: note = Description of Artificial Sequence: Synthetic oligonucleotide
  source 1..20: mol_type = other DNA
acccccgccatggagacgtt

SEQ ID NO: 557 - DNA, 20 bp, synthetic construct
  misc_feature 1..20: note = Description of Artificial Sequence: Synthetic oligonucleotide
  source 1..20: mol_type = other DNA
tacccccgccatggagacgt

SEQ ID NO: 558 - DNA, 20 bp, synthetic construct
  misc_feature 1..20: note = Description of Artificial Sequence: Synthetic oligonucleotide
  source 1..20: mol_type = other DNA
ctgcactgggcttcctggtg

SEQ ID NO: 559 - DNA, 20 bp, synthetic construct
  misc_feature 1..20: note = Description of Artificial Sequence: Synthetic oligonucleotide
  source 1..20: mol_type = other DNA
tggacctgaggatggaccgc

SEQ ID NO: 560 - DNA, 20 bp, synthetic construct
  misc_feature 1..20: note = Description of Artificial Sequence: Synthetic oligonucleotide
  source 1..20: mol_type = other DNA
agggaccctctgcactgggc

SEQ ID NO: 561 - DNA, 20 bp, synthetic construct
  misc_feature 1..20: note = Description of Artificial Sequence: Synthetic oligonucleotide
  source 1..20: mol_type = other DNA
cttgttacccccgccatgga

SEQ ID NO: 562 - DNA, 20 bp, synthetic construct
  misc_feature 1..20: note = Description of Artificial Sequence: Synthetic oligonucleotide
  source 1..20: mol_type = other DNA
aggctgggatcctccacgtc

SEQ ID NO: 563 - DNA, 20 bp, synthetic construct
  misc_feature 1..20: note = Description of Artificial Sequence: Synthetic oligonucleotide
  source 1..20: mol_type = other DNA
aagggaccctctgcactggg

SEQ ID NO: 564 - DNA, 23 bp, synthetic construct
  misc_feature 1..23: note = Synthetic oligonucleotide
  modified_base 7: mod_base = OTHER; note = uracil
  modified_base 9: mod_base = OTHER; note = uracil
  modified_base 19: mod_base = OTHER; note = uracil
  modified_base 23: mod_base = OTHER; note = uracil
  source 1..23: mol_type = other DNA
tgccactgtagaaaggcatgatt

SEQ ID NO: 565 - DNA, 23 bp, synthetic construct
  misc_feature 1..23: note = Synthetic oligonucleotide
  modified_base 7: mod_base = OTHER; note = uracil
  modified_base 9: mod_base = OTHER; note = uracil
  modified_base 19: mod_base = OTHER; note = uracil
  modified_base 23: mod_base = OTHER; note = uracil
  source 1..23: mol_type = other DNA
tgccactgtagaaaggcatgatt

SEQ ID NO: 566 - DNA, 23 bp, synthetic construct
  misc_feature 1..23: note = Synthetic oligonucleotide
  modified_base 7: mod_base = OTHER; note = uracil
  modified_base 9: mod_base = OTHER; note = uracil
  modified_base 19: mod_base = OTHER; note = uracil
  modified_base 23: mod_base = OTHER; note = uracil
  source 1..23: mol_type = other DNA
tgccactgtagaaaggcatgatt

SEQ ID NO: 567 - DNA, 21 bp, synthetic construct
  misc_feature 1..21: note = Synthetic oligonucleotide
  modified_base 7: mod_base = OTHER; note = uracil
  modified_base 9: mod_base = OTHER; note = uracil
  modified_base 21: mod_base = OTHER; note = uracil
  source 1..21: mol_type = other DNA
tgccactgtagaaaggcattt

SEQ ID NO: 568 - DNA, 23 bp, synthetic construct
  misc_feature 1..23: note = Synthetic oligonucleotide
  modified_base 7: mod_base = OTHER; note = uracil
  modified_base 9: mod_base = OTHER; note = uracil
  modified_base 23: mod_base = OTHER; note = uracil
  source 1..23: mol_type = other DNA
tgccactgtagaaaggcatgatt

SEQ ID NO: 569 - RNA, 20 nt, synthetic construct
  misc_feature 1..20: note = Description of Artificial Sequence: Synthetic oligonucleotide
  source 1..20: mol_type = other RNA
catgaagcaggaacatacca

SEQ ID NO: 570 - RNA, 20 nt, synthetic construct
  misc_feature 1..20: note = Description of Artificial Sequence: Synthetic oligonucleotide
  source 1..20: mol_type = other RNA
gcatgaagcaggaacatacc

SEQ ID NO: 571 - RNA, 20 nt, synthetic construct
  misc_feature 1..20: note = Description of Artificial Sequence: Synthetic oligonucleotide
  source 1..20: mol_type = other RNA
ggcatgaagcaggaacatac

SEQ ID NO: 572 - DNA, 20 bp, synthetic construct
  misc_feature 1..20: note = Synthetic oligonucleotide
  modified_base 19: mod_base = OTHER; note = uracil
  source 1..20: mol_type = other DNA
aggcatgaagcaggaacata

SEQ ID NO: 573 - DNA, 20 bp, synthetic construct
  misc_feature 1..20: note = Synthetic oligonucleotide
  modified_base 20: mod_base = OTHER; note = uracil
  source 1..20: mol_type = other DNA
aaggcatgaagcaggaacat

SEQ ID NO: 574 - DNA, 20 bp, synthetic construct
  misc_feature 1..20: note = Description of Artificial Sequence: Synthetic oligonucleotide
  source 1..20: mol_type = other DNA
aaaggcatgaagcaggaaca

SEQ ID NO: 575 - DNA, 20 bp, synthetic construct
  misc_feature 1..20: note = Description of Artificial Sequence: Synthetic oligonucleotide
  source 1..20: mol_type = other DNA
gaaaggcatgaagcaggaac

SEQ ID NO: 576 - DNA, 20 bp, synthetic construct
  misc_feature 1..20: note = Description of Artificial Sequence: Synthetic oligonucleotide
  source 1..20: mol_type = other DNA
agaaaggcatgaagcaggaa

SEQ ID NO: 577 - DNA, 20 bp, synthetic construct
  misc_feature 1..20: note = Synthetic oligonucleotide
  modified_base 18: mod_base = OTHER; note = uracil
  source 1..20: mol_type = other DNA
gccactgtagaaaggcatga

SEQ ID NO: 578 - DNA, 20 bp, synthetic construct
  misc_feature 1..20: note = Synthetic oligonucleotide
  modified_base 19: mod_base = OTHER; note = uracil
  source 1..20: mol_type = other DNA
ggccactgtagaaaggcatg

SEQ ID NO: 579 - DNA, 20 bp, synthetic construct
  misc_feature 1..20: note = Synthetic oligonucleotide
  modified_base 20: mod_base = OTHER; note = uracil
  source 1..20: mol_type = other DNA
aggccactgtagaaaggcat

SEQ ID NO: 580 - DNA, 20 bp, synthetic construct
  misc_feature 1..20: note = Description of Artificial Sequence: Synthetic oligonucleotide
  source 1..20: mol_type = other DNA
aaggccactgtagaaaggca

SEQ ID NO: 581 - DNA, 20 bp, synthetic construct
  misc_feature 1..20: note = Synthetic oligonucleotide
  modified_base 1: mod_base = OTHER; note = uracil
  source 1..20: mol_type = other DNA
taaggccactgtagaaaggc

SEQ ID NO: 582 - DNA, 20 bp, synthetic construct
  misc_feature 1..20: note = Synthetic oligonucleotide
  modified_base 2: mod_base = OTHER; note = uracil
  source 1..20: mol_type = other DNA
ataaggccactgtagaaagg

SEQ ID NO: 583 - DNA, 20 bp, synthetic construct
  misc_feature 1..20: note = Synthetic oligonucleotide
  modified_base 3: mod_base = OTHER; note = uracil
  source 1..20: mol_type = other DNA
gataaggccactgtagaaag

SEQ ID NO: 584 - DNA, 20 bp, synthetic construct
  misc_feature 1..20: note = Synthetic oligonucleotide
  modified_base 4: mod_base = OTHER; note = uracil
  source 1..20: mol_type = other DNA
ggataaggccactgtagaaa

SEQ ID NO: 585 - DNA, 20 bp, synthetic construct
  misc_feature 1..20: note = Description of Artificial Sequence: Synthetic oligonucleotide
  source 1..20: mol_type = other DNA
catgaagcaggaacatacca

SEQ ID NO: 586 - DNA, 20 bp, synthetic construct
  misc_feature 1..20: note = Description of Artificial Sequence: Synthetic oligonucleotide
  source 1..20: mol_type = other DNA
gcatgaagcaggaacatacc

SEQ ID NO: 587 - DNA, 20 bp, synthetic construct
  misc_feature 1..20: note = Description of Artificial Sequence: Synthetic oligonucleotide
  source 1..20: mol_type = other DNA
ggcatgaagcaggaacatac

SEQ ID NO: 588 - DNA, 20 bp, synthetic construct
  misc_feature 1..20: note = Description of Artificial Sequence: Synthetic oligonucleotide
  source 1..20: mol_type = other DNA
aggcatgaagcaggaacata

SEQ ID NO: 589 - DNA, 20 bp, synthetic construct
  misc_feature 1..20: note = Description of Artificial Sequence: Synthetic oligonucleotide
  source 1..20: mol_type = other DNA
aaggcatgaagcaggaacat

SEQ ID NO: 590 - DNA, 20 bp, synthetic construct
  misc_feature 1..20: note = Description of Artificial Sequence: Synthetic oligonucleotide
  source 1..20: mol_type = other DNA
aaaggcatgaagcaggaaca

SEQ ID NO: 591 - DNA, 20 bp, synthetic construct
  misc_feature 1..20: note = Description of Artificial Sequence: Synthetic oligonucleotide
  source 1..20: mol_type = other DNA
gaaaggcatgaagcaggaac

SEQ ID NO: 592 - DNA, 20 bp, synthetic construct
  misc_feature 1..20: note = Description of Artificial Sequence: Synthetic oligonucleotide
  source 1..20: mol_type = other DNA
agaaaggcatgaagcaggaa

SEQ ID NO: 593 - DNA, 20 bp, synthetic construct
  misc_feature 1..20: note = Description of Artificial Sequence: Synthetic oligonucleotide
  source 1..20: mol_type = other DNA
tagaaaggcatgaagcagga

SEQ ID NO: 594 - DNA, 20 bp, synthetic construct
  misc_feature 1..20: note = Description of Artificial Sequence: Synthetic oligonucleotide
  source 1..20: mol_type = other DNA
gtagaaaggcatgaagcagg

SEQ ID NO: 595 - DNA, 20 bp, synthetic construct
  misc_feature 1..20: note = Description of Artificial Sequence: Synthetic oligonucleotide
  source 1..20: mol_type = other DNA
tgtagaaaggcatgaagcag

SEQ ID NO: 596 - DNA, 20 bp, synthetic construct
  misc_feature 1..20: note = Description of Artificial Sequence: Synthetic oligonucleotide
  source 1..20: mol_type = other DNA
ctgtagaaaggcatgaagca

SEQ ID NO: 597 - DNA, 20 bp, synthetic construct
  misc_feature 1..20: note = Description of Artificial Sequence: Synthetic oligonucleotide
  source 1..20: mol_type = other DNA
actgtagaaaggcatgaagc

SEQ ID NO: 598 - DNA, 20 bp, synthetic construct
  misc_feature 1..20: note = Description of Artificial Sequence: Synthetic oligonucleotide
  source 1..20: mol_type = other DNA
cactgtagaaaggcatgaag

SEQ ID NO: 599 - DNA, 20 bp, synthetic construct
  misc_feature 1..20: note = Description of Artificial Sequence: Synthetic oligonucleotide
  source 1..20: mol_type = other DNA
ccactgtagaaaggcatgaa

SEQ ID NO: 600 - DNA, 20 bp, synthetic construct
  misc_feature 1..20: note = Description of Artificial Sequence: Synthetic oligonucleotide
  source 1..20: mol_type = other DNA
gccactgtagaaaggcatga

SEQ ID NO: 601 - DNA, 20 bp, synthetic construct
  misc_feature 1..20: note = Description of Artificial Sequence: Synthetic oligonucleotide
  source 1..20: mol_type = other DNA
ggccactgtagaaaggcatg

SEQ ID NO: 602 - DNA, 20 bp, synthetic construct
  misc_feature 1..20: note = Description of Artificial Sequence: Synthetic oligonucleotide
  source 1..20: mol_type = other DNA
aggccactgtagaaaggcat

SEQ ID NO: 603 - DNA, 20 bp, synthetic construct
  misc_feature 1..20: note = Description of Artificial Sequence: Synthetic oligonucleotide
  source 1..20: mol_type = other DNA
aaggccactgtagaaaggca

SEQ ID NO: 604 - DNA, 20 bp, synthetic construct
  misc_feature 1..20: note = Description of Artificial Sequence: Synthetic oligonucleotide
  source 1..20: mol_type = other DNA
taaggccactgtagaaaggc

SEQ ID NO: 605 - DNA, 20 bp, synthetic construct
  misc_feature 1..20: note = Description of Artificial Sequence: Synthetic oligonucleotide
  source 1..20: mol_type = other DNA
ataaggccactgtagaaagg

SEQ ID NO: 606 - DNA, 20 bp, synthetic construct
  misc_feature 1..20: note = Description of Artificial Sequence: Synthetic oligonucleotide
  source 1..20: mol_type = other DNA
gataaggccactgtagaaag

SEQ ID NO: 607 - DNA, 20 bp, synthetic construct
  misc_feature 1..20: note = Description of Artificial Sequence: Synthetic oligonucleotide
  source 1..20: mol_type = other DNA
ggataaggccactgtagaaa

SEQ ID NO: 608 - RNA, 20 nt, synthetic construct
  misc_feature 1..20: note = Description of Artificial Sequence: Synthetic oligonucleotide
  source 1..20: mol_type = other RNA
catgaagcaggaacatacca

SEQ ID NO: 609 - RNA, 20 nt, synthetic construct
  misc_feature 1..20: note = Description of Artificial Sequence: Synthetic oligonucleotide
  source 1..20: mol_type = other RNA
gcatgaagcaggaacatacc

SEQ ID NO: 610 - RNA, 20 nt, synthetic construct
  misc_feature 1..20: note = Description of Artificial Sequence: Synthetic oligonucleotide
  source 1..20: mol_type = other RNA
ggcatgaagcaggaacatac

SEQ ID NO: 611 - DNA, 20 bp, synthetic construct
  misc_feature 1..20: note = Synthetic oligonucleotide
  modified_base 19: mod_base = OTHER; note = uracil
  source 1..20: mol_type = other DNA
aggcatgaagcaggaacata

SEQ ID NO: 612 - DNA, 20 bp, synthetic construct
  misc_feature 1..20: note = Description of Artificial Sequence: Synthetic oligonucleotide
  source 1..20: mol_type = other DNA
aaggcatgaagcaggaacat

SEQ ID NO: 613 - DNA, 20 bp, synthetic construct
  misc_feature 1..20: note = Description of Artificial Sequence: Synthetic oligonucleotide
  source 1..20: mol_type = other DNA
aaaggcatgaagcaggaaca

SEQ ID NO: 614 - DNA, 20 bp, synthetic construct
  misc_feature 1..20: note = Description of Artificial Sequence: Synthetic oligonucleotide
  source 1..20: mol_type = other DNA
gaaaggcatgaagcaggaac

SEQ ID NO: 615 - DNA, 20 bp, synthetic construct
  misc_feature 1..20: note = Description of Artificial Sequence: Synthetic oligonucleotide
  source 1..20: mol_type = other DNA
agaaaggcatgaagcaggaa

SEQ ID NO: 616 - DNA, 20 bp, synthetic construct
  misc_feature 1..20: note = Description of Artificial Sequence: Synthetic oligonucleotide
  source 1..20: mol_type = other DNA
tagaaaggcatgaagcagga

SEQ ID NO: 617 - DNA, 20 bp, synthetic construct
  misc_feature 1..20: note = Synthetic oligonucleotide
  modified_base 2: mod_base = OTHER; note = uracil
  source 1..20: mol_type = other DNA
gtagaaaggcatgaagcagg

SEQ ID NO: 618 - DNA, 20 bp, synthetic construct
  misc_feature 1..20: note = Synthetic oligonucleotide
  modified_base 3: mod_base = OTHER; note = uracil
  source 1..20: mol_type = other DNA
tgtagaaaggcatgaagcag

SEQ ID NO: 619 - DNA, 20 bp, synthetic construct
  misc_feature 1..20: note = Synthetic oligonucleotide
  modified_base 2: mod_base = OTHER; note = uracil
  modified_base 4: mod_base = OTHER; note = uracil
  source 1..20: mol_type = other DNA
ctgtagaaaggcatgaagca

SEQ ID NO: 620 - DNA, 20 bp, synthetic construct
  misc_feature 1..20: note = Synthetic oligonucleotide
  modified_base 3: mod_base = OTHER; note = uracil
  modified_base 5: mod_base = OTHER; note = uracil
  source 1..20: mol_type = other DNA
actgtagaaaggcatgaagc

SEQ ID NO: 621 - DNA, 20 bp, synthetic construct
  misc_feature 1..20: note = Synthetic oligonucleotide
  modified_base 4: mod_base = OTHER; note = uracil
  modified_base 16: mod_base = OTHER; note = uracil
  source 1..20: mol_type = other DNA
cactgtagaaaggcatgaag

SEQ ID NO: 622 - DNA, 20 bp, synthetic construct
  misc_feature 1..20: note = Synthetic oligonucleotide
  modified_base 5: mod_base = OTHER; note = uracil
  modified_base 17: mod_base = OTHER; note = uracil
  source 1..20: mol_type = other DNA
ccactgtagaaaggcatgaa

SEQ ID NO: 623 - DNA, 20 bp, synthetic construct
  misc_feature 1..20: note = Synthetic oligonucleotide
  modified_base 18: mod_base = OTHER; note = uracil
  source 1..20: mol_type = other DNA
gccactgtagaaaggcatga

SEQ ID NO: 624 - DNA, 20 bp, synthetic construct
  misc_feature 1..20: note = Synthetic oligonucleotide
  modified_base 19: mod_base = OTHER; note = uracil
  source 1..20: mol_type = other DNA
ggccactgtagaaaggcatg

SEQ ID NO: 625 - DNA, 20 bp, synthetic construct
  misc_feature 1..20: note = Description of Artificial Sequence: Synthetic oligonucleotide
  source 1..20: mol_type = other DNA
aggccactgtagaaaggcat

SEQ ID NO: 626 - DNA, 20 bp, synthetic construct
  misc_feature 1..20: note = Description of Artificial Sequence: Synthetic oligonucleotide
  source 1..20: mol_type = other DNA
aaggccactgtagaaaggca

SEQ ID NO: 627 - DNA, 20 bp, synthetic construct
  misc_feature 1..20: note = Description of Artificial Sequence: Synthetic oligonucleotide
  source 1..20: mol_type = other DNA
taaggccactgtagaaaggc

SEQ ID NO: 628 - DNA, 20 bp, synthetic construct
  misc_feature 1..20: note = Synthetic oligonucleotide
  modified_base 2: mod_base = OTHER; note = uracil
  source 1..20: mol_type = other DNA
ataaggccactgtagaaagg

SEQ ID NO: 629 - DNA, 20 bp, synthetic construct
  misc_feature 1..20: note = Synthetic oligonucleotide
  modified_base 3: mod_base = OTHER; note = uracil
  source 1..20: mol_type = other DNA
gataaggccactgtagaaag

SEQ ID NO: 630 - DNA, 20 bp, synthetic construct
  misc_feature 1..20: note = Synthetic oligonucleotide
  modified_base 4: mod_base = OTHER; note = uracil
  source 1..20: mol_type = other DNA
ggataaggccactgtagaaa

SEQ ID NO: 631 - DNA, 20 bp, synthetic construct
  misc_feature 1..20: note = Description of Artificial Sequence: Synthetic oligonucleotide
  source 1..20: mol_type = other DNA
catgaagcaggaacatacca

SEQ ID NO: 632 - DNA, 20 bp, synthetic construct
  misc_feature 1..20: note = Description of Artificial Sequence: Synthetic oligonucleotide
  source 1..20: mol_type = other DNA
gcatgaagcaggaacatacc

SEQ ID NO: 633 - DNA, 20 bp, synthetic construct
  misc_feature 1..20: note = Description of Artificial Sequence: Synthetic oligonucleotide
  source 1..20: mol_type = other DNA
ggcatgaagcaggaacatac

SEQ ID NO: 634 - DNA, 20 bp, synthetic construct
  misc_feature 1..20: note = Description of Artificial Sequence: Synthetic oligonucleotide
  source 1..20: mol_type = other DNA
aggcatgaagcaggaacata

SEQ ID NO: 635 - DNA, 20 bp, synthetic construct
  misc_feature 1..20: note = Description of Artificial Sequence: Synthetic oligonucleotide
  source 1..20: mol_type = other DNA
aaggcatgaagcaggaacat

SEQ ID NO: 636 - DNA, 20 bp, synthetic construct
  misc_feature 1..20: note = Description of Artificial Sequence: Synthetic oligonucleotide
  source 1..20: mol_type = other DNA
aaaggcatgaagcaggaaca

SEQ ID NO: 637 - DNA, 20 bp, synthetic construct
  misc_feature 1..20: note = Description of Artificial Sequence: Synthetic oligonucleotide
  source 1..20: mol_type = other DNA
gaaaggcatgaagcaggaac

SEQ ID NO: 638 - DNA, 20 bp, synthetic construct
  misc_feature 1..20: note = Description of Artificial Sequence: Synthetic oligonucleotide
  source 1..20: mol_type = other DNA
agaaaggcatgaagcaggaa

SEQ ID NO: 639 - DNA, 20 bp, synthetic construct
  misc_feature 1..20: note = Description of Artificial Sequence: Synthetic oligonucleotide
  source 1..20: mol_type = other DNA
tagaaaggcatgaagcagga

SEQ ID NO: 640 - DNA, 20 bp, synthetic construct
  misc_feature 1..20: note = Description of Artificial Sequence: Synthetic oligonucleotide
  source 1..20: mol_type = other DNA
gtagaaaggcatgaagcagg

SEQ ID NO: 641 - DNA, 20 bp, synthetic construct
  misc_feature 1..20: note = Description of Artificial Sequence: Synthetic oligonucleotide
  source 1..20: mol_type = other DNA
tgtagaaaggcatgaagcag

SEQ ID NO: 642 - DNA, 20 bp, synthetic construct
  misc_feature 1..20: note = Description of Artificial Sequence: Synthetic oligonucleotide
  source 1..20: mol_type = other DNA
ctgtagaaaggcatgaagca

SEQ ID NO: 643 - DNA, 20 bp, synthetic construct
  misc_feature 1..20: note = Description of Artificial Sequence: Synthetic oligonucleotide
  source 1..20: mol_type = other DNA
actgtagaaaggcatgaagc

SEQ ID NO: 644 - DNA, 20 bp, synthetic construct
  misc_feature 1..20: note = Description of Artificial Sequence: Synthetic oligonucleotide
  source 1..20: mol_type = other DNA
cactgtagaaaggcatgaag

SEQ ID NO: 645 - DNA, 20 bp, synthetic construct
  misc_feature 1..20: note = Description of Artificial Sequence: Synthetic oligonucleotide
  source 1..20: mol_type = other DNA
ccactgtagaaaggcatgaa

SEQ ID NO: 646 - DNA, 20 bp, synthetic construct
  misc_feature 1..20: note = Description of Artificial Sequence: Synthetic oligonucleotide
  source 1..20: mol_type = other DNA
gccactgtagaaaggcatga

SEQ ID NO: 647 - DNA, 20 bp, synthetic construct
  misc_feature 1..20: note = Description of Artificial Sequence: Synthetic oligonucleotide
  source 1..20: mol_type = other DNA
ggccactgtagaaaggcatg

SEQ ID NO: 648 - DNA, 20 bp, synthetic construct
  misc_feature 1..20: note = Description of Artificial Sequence: Synthetic oligonucleotide
  source 1..20: mol_type = other DNA
aggccactgtagaaaggcat

SEQ ID NO: 649 - DNA, 20 bp, synthetic construct
  misc_feature 1..20: note = Description of Artificial Sequence: Synthetic oligonucleotide
  source 1..20: mol_type = other DNA
aaggccactgtagaaaggca

SEQ ID NO: 650 - DNA, 20 bp, synthetic construct
  misc_feature 1..20: note = Description of Artificial Sequence: Synthetic oligonucleotide
  source 1..20: mol_type = other DNA
taaggccactgtagaaaggc

SEQ ID NO: 651 - DNA, 20 bp, synthetic construct
  misc_feature 1..20: note = Description of Artificial Sequence: Synthetic oligonucleotide
  source 1..20: mol_type = other DNA
ataaggccactgtagaaagg

SEQ ID NO: 652 - DNA, 20 bp, synthetic construct
  misc_feature 1..20: note = Description of Artificial Sequence: Synthetic oligonucleotide
  source 1..20: mol_type = other DNA
gataaggccactgtagaaag

SEQ ID NO: 653 - DNA, 20 bp, synthetic construct
  misc_feature 1..20: note = Description of Artificial Sequence: Synthetic oligonucleotide
  source 1..20: mol_type = other DNA
ggataaggccactgtagaaa

SEQ ID NO: 654 - DNA, 20 bp, synthetic construct
  misc_feature 1..20: note = Description of Artificial Sequence: Synthetic oligonucleotide
  source 1..20: mol_type = other DNA
ggacctgaggatggaccgcg

SEQ ID NO: 655 - DNA, 20 bp, synthetic construct
  misc_feature 1..20: note = Description of Artificial Sequence: Synthetic oligonucleotide
  source 1..20: mol_type = other DNA
ggacctgaggatggaccgcg

SEQ ID NO: 656 - DNA, 23 bp, synthetic construct
  misc_feature 1..23: note = Synthetic oligonucleotide
  modified_base 7: mod_base = OTHER; note = uracil
  modified_base 9: mod_base = OTHER; note = uracil
  modified_base 19: mod_base = OTHER; note = uracil
  modified_base 23: mod_base = OTHER; note = uracil
  source 1..23: mol_type = other DNA
tgccactgtagaaaggcatgatt

SEQ ID NO: 657 - DNA, 20 bp, synthetic construct
  misc_feature 1..20: note = Description of Artificial Sequence: Synthetic oligonucleotide
  source 1..20: mol_type = other DNA
ggacctgaggatggaccgcg

SEQ ID NO: 658 - DNA, 20 bp, synthetic construct
  misc_feature 1..20: note = Description of Artificial Sequence: Synthetic oligonucleotide
  source 1..20: mol_type = other DNA
ggacctgaggatggaccgcg

SEQ ID NO: 659 - DNA, 20 bp, synthetic construct
  misc_feature 1..20: note = Description of Artificial Sequence: Synthetic oligonucleotide
  source 1..20: mol_type = other DNA
ggacctgaggatggaccgcg

SEQ ID NO: 660 - DNA, 20 bp, synthetic construct
  misc_feature 1..20: note = Description of Artificial Sequence: Synthetic oligonucleotide
  source 1..20: mol_type = other DNA
ggacctgaggatggaccgcg

SEQ ID NO: 661 - DNA, 20 bp, synthetic construct
  misc_feature 1..20: note = Description of Artificial Sequence: Synthetic oligonucleotide
  source 1..20: mol_type = other DNA
ggacctgaggatggaccgcg

SEQ ID NO: 662 - DNA, 20 bp, synthetic construct
  misc_feature 1..20: note = Description of Artificial Sequence: Synthetic oligonucleotide
  source 1..20: mol_type = other DNA
ggacctgaggatggaccgcg

SEQ ID NO: 663 - DNA, 20 bp, synthetic construct
  misc_feature 1..20: note = Description of Artificial Sequence: Synthetic oligonucleotide
  source 1..20: mol_type = other DNA
ggacctgaggatggaccgcg

SEQ ID NO: 664 - DNA, 20 bp, synthetic construct
  misc_feature 1..20: note = Description of Artificial Sequence: Synthetic oligonucleotide
  source 1..20: mol_type = other DNA
ggacctgaggatggaccgcg

SEQ ID NO: 665 - DNA, 20 bp, synthetic construct
  misc_feature 1..20: note = Description of Artificial Sequence: Synthetic oligonucleotide
  source 1..20: mol_type = other DNA
ggacctgaggatggaccgcg

SEQ ID NO: 666 - DNA, 20 bp, synthetic construct
  misc_feature 1..20: note = Description of Artificial Sequence: Synthetic oligonucleotide
  source 1..20: mol_type = other DNA
ggacctgaggatggaccgcg

SEQ ID NO: 667 - DNA, 20 bp, synthetic construct
  misc_feature 1..20: note = Description of Artificial Sequence: Synthetic oligonucleotide
  source 1..20: mol_type = other DNA
ggacctgaggatggaccgcg

SEQ ID NO: 668 - DNA, 20 bp, synthetic construct
  misc_feature 1..20: note = Description of Artificial Sequence: Synthetic oligonucleotide
  source 1..20: mol_type = other DNA
ggacctgaggatggaccgcg

SEQ ID NO: 669 - DNA, 20 bp, synthetic construct
  misc_feature 1..20: note = Description of Artificial Sequence: Synthetic oligonucleotide
  source 1..20: mol_type = other DNA
ggacctgaggatggaccgcg

SEQ ID NO: 670 - DNA, 20 bp, synthetic construct
  misc_feature 1..20: note = Description of Artificial Sequence: Synthetic oligonucleotide
  source 1..20: mol_type = other DNA
ggacctgaggatggaccgcg

SEQ ID NO: 671 - DNA, 20 bp, synthetic construct
  misc_feature 1..20: note = Description of Artificial Sequence: Synthetic oligonucleotide
  source 1..20: mol_type = other DNA
ggacctgaggatggaccgcg

SEQ ID NO: 672 - DNA, 20 bp, synthetic construct
  misc_feature 1..20: note = Description of Artificial Sequence: Synthetic oligonucleotide
  source 1..20: mol_type = other DNA
ggacctgaggatggaccgcg

SEQ ID NO: 673 - DNA, 23 bp, synthetic construct
  misc_feature 1..23: note = Synthetic oligonucleotide
  modified_base 7: mod_base = OTHER; note = uracil
  modified_base 9: mod_base = OTHER; note = uracil
  modified_base 19: mod_base = OTHER; note = uracil
  modified_base 23: mod_base = OTHER; note = uracil
  source 1..23: mol_type = other DNA
tgccactgtagaaaggcatgatt

SEQ ID NO: 674 - DNA, 23 bp, synthetic construct
  misc_feature 1..23: note = Synthetic oligonucleotide
  modified_base 7: mod_base = OTHER; note = uracil
  modified_base 9: mod_base = OTHER; note = uracil
  modified_base 23: mod_base = OTHER; note = uracil
  source 1..23: mol_type = other DNA
tgccactgtagaaaggcatgatt

SEQ ID NO: 675 - DNA, 23 bp, synthetic construct
  misc_feature 1..23: note = Synthetic oligonucleotide
  modified_base 7: mod_base = OTHER; note = uracil
  modified_base 9: mod_base = OTHER; note = uracil
  modified_base 23: mod_base = OTHER; note = uracil
  source 1..23: mol_type = other DNA
tgccactgtagaaaggcatgatt

SEQ ID NO: 676 - DNA, 23 bp, synthetic construct
  misc_feature 1..23: note = Synthetic oligonucleotide
  modified_base 7: mod_base = OTHER; note = uracil
  modified_base 9: mod_base = OTHER; note = uracil
  modified_base 23: mod_base = OTHER; note = uracil
  source 1..23: mol_type = other DNA
tgccactgtagaaaggcatgatt

SEQ ID NO: 677 - DNA, 23 bp, synthetic construct
  misc_feature 1..23: note = Synthetic oligonucleotide
  modified_base 7: mod_base = OTHER; note = uracil
  modified_base 9: mod_base = OTHER; note = uracil
  modified_base 23: mod_base = OTHER; note = uracil
  source 1..23: mol_type = other DNA
tgccactgtagaaaggcatgatt

SEQ ID NO: 678 - DNA, 23 bp, synthetic construct
  misc_feature 1..23: note = Synthetic oligonucleotide
  modified_base 7: mod_base = OTHER; note = uracil
  modified_base 9: mod_base = OTHER; note = uracil
  modified_base 19: mod_base = OTHER; note = uracil
  modified_base 23: mod_base = OTHER; note = uracil
  source 1..23: mol_type = other DNA
tgccactgtagaaaggcatgatt

SEQ ID NO: 679 - DNA, 23 bp, synthetic construct
  misc_feature 1..23: note = Synthetic oligonucleotide
  modified_base 7: mod_base = OTHER; note = uracil
  modified_base 9: mod_base = OTHER; note = uracil
  modified_base 19: mod_base = OTHER; note = uracil
  modified_base 23: mod_base = OTHER; note = uracil
  source 1..23: mol_type = other DNA
tgccactgtagaaaggcatgatt

SEQ ID NO: 680 - DNA, 23 bp, synthetic construct
  misc_feature 1..23: note = Synthetic oligonucleotide
  modified_base 7: mod_base = OTHER; note = uracil
  modified_base 9: mod_base = OTHER; note = uracil
  modified_base 23: mod_base = OTHER; note = uracil
  source 1..23: mol_type = other DNA
tgccactgtagaaaggcatgatt

SEQ ID NO: 681 - DNA, 23 bp, synthetic construct
  misc_feature 1..23: note = Synthetic oligonucleotide
  modified_base 7: mod_base = OTHER; note = uracil
  modified_base 9: mod_base = OTHER; note = uracil
  modified_base 23: mod_base = OTHER; note = uracil
  source 1..23: mol_type = other DNA
tgccactgtagaaaggcatgatt

SEQ ID NO: 682 - DNA, 23 bp, synthetic construct
  misc_feature 1..23: note = Synthetic oligonucleotide
  modified_base 7: mod_base = OTHER; note = uracil
  modified_base 9: mod_base = OTHER; note = uracil
  modified_base 23: mod_base = OTHER; note = uracil
  source 1..23: mol_type = other DNA
tgccactgtagaaaggcatgatt

SEQ ID NO: 683 - DNA, 23 bp, synthetic construct
  misc_feature 1..23: note = Synthetic oligonucleotide
  modified_base 7: mod_base = OTHER; note = uracil
  modified_base 9: mod_base = OTHER; note = uracil
  modified_base 23: mod_base = OTHER; note = uracil
  source 1..23: mol_type = other DNA
tgccactgtagaaaggcatgatt

SEQ ID NO: 684 - DNA, 23 bp, synthetic construct
  misc_feature 1..23: note = Synthetic oligonucleotide
  modified_base 7: mod_base = OTHER; note = uracil
  modified_base 9: mod_base = OTHER; note = uracil
  modified_base 19: mod_base = OTHER; note = uracil
  modified_base 23: mod_base = OTHER; note = uracil
  source 1..23: mol_type = other DNA
tgccactgtagaaaggcatgatt

SEQ ID NO: 685 - DNA, 23 bp, synthetic construct
  misc_feature 1..23: note = Synthetic oligonucleotide
  modified_base 7: mod_base = OTHER; note = uracil
  modified_base 9: mod_base = OTHER; note = uracil
  modified_base 19: mod_base = OTHER; note = uracil
  modified_base 23: mod_base = OTHER; note = uracil
  source 1..23: mol_type = other DNA
tgccactgtagaaaggcatgatt

SEQ ID NO: 686 - DNA, 45 bp, synthetic construct
  misc_feature 1..45: note = Synthetic oligonucleotide
  modified_base 7: mod_base = OTHER; note = uracil
  modified_base 9: mod_base = OTHER; note = uracil
  modified_base 19: mod_base = OTHER; note = uracil
  modified_base 21: mod_base = OTHER; note = uracil
  source 1..45: mol_type = other DNA
tgccactgtagaaaggcattttttttggtaatccactttcagagg

SEQ ID NO: 687 - DNA, 45 bp, synthetic construct; identical to SEQ ID NO: 686
  misc_feature 1..45: note = Synthetic oligonucleotide
  modified_base 7: mod_base = OTHER; note = uracil
  modified_base 9: mod_base = OTHER; note = uracil
  modified_base 19: mod_base = OTHER; note = uracil
  modified_base 21: mod_base = OTHER; note = uracil
  source 1..45: mol_type = other DNA

SEQ ID NO: 688 - DNA, 45 bp, synthetic construct; identical to SEQ ID NO: 686
  misc_feature 1..45: note = Synthetic oligonucleotide
  modified_base 7: mod_base = OTHER; note = uracil
  modified_base 9: mod_base = OTHER; note = uracil
  modified_base 19: mod_base = OTHER; note = uracil
  modified_base 21: mod_base = OTHER; note = uracil
  source 1..45: mol_type = other DNA

SEQ ID NO: 689 - DNA, 45 bp, synthetic construct; identical to SEQ ID NO: 686
  misc_feature 1..45: note = Synthetic oligonucleotide
  modified_base 7: mod_base = OTHER; note = uracil
  modified_base 9: mod_base = OTHER; note = uracil
  modified_base 19: mod_base = OTHER; note = uracil
  modified_base 21: mod_base = OTHER; note = uracil
  source 1..45: mol_type = other DNA

SEQ ID NO: 690 - DNA, 45 bp, synthetic construct; identical to SEQ ID NO: 686
  misc_feature 1..45: note = Synthetic oligonucleotide
  modified_base 7: mod_base = OTHER; note = uracil
  modified_base 9: mod_base = OTHER; note = uracil
  modified_base 19: mod_base = OTHER; note = uracil
  modified_base 21: mod_base = OTHER; note = uracil
  source 1..45: mol_type = other DNA

SEQ ID NO: 691 - DNA, 20 bp, synthetic construct
  misc_feature 1..20: note = Description of Artificial Sequence: Synthetic oligonucleotide
  source 1..20: mol_type = other DNA
ggacctgaggatggaccgcg

SEQ ID NO: 692 - DNA, 20 bp, synthetic construct
  misc_feature 1..20: note = Description of Artificial Sequence: Synthetic oligonucleotide
  source 1..20: mol_type = other DNA
ggacctgaggatggaccgcg

SEQ ID NO: 693 - DNA, 20 bp, synthetic construct
  misc_feature 1..20: note = Description of Artificial Sequence: Synthetic oligonucleotide
  source 1..20: mol_type = other DNA
ggacctgaggatggaccgcg

SEQ ID NO: 694 - DNA, 23 bp, synthetic construct
  misc_feature 1..23: note = Synthetic oligonucleotide
  modified_base 7: mod_base = OTHER; note = uracil
  modified_base 9: mod_base = OTHER; note = uracil
  modified_base 19: mod_base = OTHER; note = uracil
  modified_base 23: mod_base = OTHER; note = uracil
  source 1..23: mol_type = other DNA
tgccactgtagaaaggcatgatt

SEQ ID NO: 695 - DNA, 23 bp, synthetic construct
  misc_feature 1..23: note = Synthetic oligonucleotide
  modified_base 7: mod_base = OTHER; note = uracil
  modified_base 9: mod_base = OTHER; note = uracil
  modified_base 19: mod_base = OTHER; note = uracil
  modified_base 23: mod_base = OTHER; note = uracil
  source 1..23: mol_type = other DNA
tgccactgtagaaaggcatgatt

SEQ ID NO: 696 - DNA, 23 bp, synthetic construct
  misc_feature 1..23: note = Synthetic oligonucleotide
  modified_base 7: mod_base = OTHER; note = uracil
  modified_base 9: mod_base = OTHER; note = uracil
  modified_base 23: mod_base = OTHER; note = uracil
  source 1..23: mol_type = other DNA
tgccactgtagaaaggcatgatt

SEQ ID NO: 697 - DNA, 23 bp, synthetic construct
  misc_feature 1..23: note = Synthetic oligonucleotide
  modified_base 7: mod_base = OTHER; note = uracil
  modified_base 9: mod_base = OTHER; note = uracil
  modified_base 23: mod_base = OTHER; note = uracil
  source 1..23: mol_type = other DNA
tgccactgtagaaaggcatgatt

SEQ ID NO: 698 - DNA, 23 bp, synthetic construct
  misc_feature 1..23: note = Synthetic oligonucleotide
  modified_base 7: mod_base = OTHER; note = uracil
  modified_base 9: mod_base = OTHER; note = uracil
  modified_base 23: mod_base = OTHER; note = uracil
  source 1..23: mol_type = other DNA
tgccactgtagaaaggcatgatt

SEQ ID NO: 699 - DNA, 23 bp, synthetic construct
  misc_feature 1..23: note = Synthetic oligonucleotide
  modified_base 7: mod_base = OTHER; note = uracil
  modified_base 9: mod_base = OTHER; note = uracil
  modified_base 23: mod_base = OTHER; note = uracil
  source 1..23: mol_type = other DNA
tgccactgtagaaaggcatgatt

SEQ ID NO: 700 - DNA, 23 bp, synthetic construct
  misc_feature 1..23: note = Synthetic oligonucleotide
  modified_base 7: mod_base = OTHER; note = uracil
  modified_base 9: mod_base = OTHER; note = uracil
  modified_base 19: mod_base = OTHER; note = uracil
  modified_base 23: mod_base = OTHER; note = uracil
  source 1..23: mol_type = other DNA
tgccactgtagaaaggcatgatt

SEQ ID NO: 701 - DNA, 20 bp, synthetic construct
  misc_feature 1..20: note = Description of Artificial Sequence: Synthetic oligonucleotide
  source 1..20: mol_type = other DNA
ggacctgaggatggaccgcg

SEQ ID NO: 702 - DNA, 20 bp, synthetic construct
  misc_feature 1..20: note = Description of Artificial Sequence: Synthetic oligonucleotide
  source 1..20: mol_type = other DNA
ggacctgaggatggaccgcg

SEQ ID NO: 703 - DNA, 20 bp, synthetic construct
  misc_feature 1..20: note = Description of Artificial Sequence: Synthetic oligonucleotide
  source 1..20: mol_type = other DNA
ggacctgaggatggaccgcg

SEQ ID NO: 704 - DNA, 20 bp, synthetic construct
  misc_feature 1..20: note = Description of Artificial Sequence: Synthetic oligonucleotide
  source 1..20: mol_type = other DNA
ggacctgaggatggaccgcg

SEQ ID NO: 705 - DNA, 20 bp, synthetic construct
  misc_feature 1..20: note = Description of Artificial Sequence: Synthetic oligonucleotide
  source 1..20: mol_type = other DNA
ggacctgaggatggaccgcg

SEQ ID NO: 706 - DNA, 20 bp, synthetic construct
  misc_feature 1..20: note = Description of Artificial Sequence: Synthetic oligonucleotide
  source 1..20: mol_type = other DNA
ggacctgaggatggaccgcg

SEQ ID NO: 707 - DNA, 20 bp, synthetic construct
  misc_feature 1..20: note = Description of Artificial Sequence: Synthetic oligonucleotide
  source 1..20: mol_type = other DNA
ggacctgaggatggaccgcg

SEQ ID NO: 708 - DNA, 20 bp, synthetic construct
  misc_feature 1..20: note = Description of Artificial Sequence: Synthetic oligonucleotide
  source 1..20: mol_type = other DNA
ggacctgaggatggaccgcg

SEQ ID NO: 709 - DNA, 20 bp, synthetic construct
  misc_feature 1..20: note = Description of Artificial Sequence: Synthetic oligonucleotide
  source 1..20: mol_type = other DNA
ggacctgaggatggaccgcg

SEQ ID NO: 710 - DNA, 20 bp, synthetic construct
  misc_feature 1..20: note = Description of Artificial Sequence: Synthetic oligonucleotide
  source 1..20: mol_type = other DNA
ggacctgaggatggaccgcg

SEQ ID NO: 711 - DNA, 20 bp, synthetic construct
  misc_feature 1..20: note = Description of Artificial Sequence: Synthetic oligonucleotide
  source 1..20: mol_type = other DNA
ggacctgaggatggaccgcg

SEQ ID NO: 712 - DNA, 20 bp, synthetic construct
  misc_feature 1..20: note = Description of Artificial Sequence: Synthetic oligonucleotide
  source 1..20: mol_type = other DNA
ggacctgaggatggaccgcg

SEQ ID NO: 713 - DNA, 23 bp, synthetic construct
  misc_feature 1..23: note = Synthetic oligonucleotide
  modified_base 7: mod_base = OTHER; note = uracil
  modified_base 9: mod_base = OTHER; note = uracil
  modified_base 19: mod_base = OTHER; note = uracil
  modified_base 23: mod_base = OTHER; note = uracil
  source 1..23: mol_type = other DNA
tgccactgtagaaaggcatgatt

SEQ ID NO: 714 - DNA, 23 bp, synthetic construct
  misc_feature 1..23: note = Synthetic oligonucleotide
  modified_base 7: mod_base = OTHER; note = uracil
  modified_base 9: mod_base = OTHER; note = uracil
  modified_base 19: mod_base = OTHER; note = uracil
  modified_base 23: mod_base = OTHER; note = uracil
  source 1..23: mol_type = other DNA
tgccactgtagaaaggcatgatt

SEQ ID NO: 715 - RNA, 27 nt, synthetic construct
  misc_feature 1..27: note = Description of Artificial Sequence: Synthetic oligonucleotide
  source 1..27: mol_type = other RNA
ctgtgacgtggaggatcccagcctctg

SEQ ID NO: 716 - DNA, 20 bp, synthetic construct
  misc_feature 1..20: note = Description of Artificial Sequence: Synthetic oligonucleotide
  source 1..20: mol_type = other DNA
ggacctgaggatggaccgcg

SEQ ID NO: 717 - DNA, 20 bp, synthetic construct
  misc_feature 1..20: note = Description of Artificial Sequence: Synthetic oligonucleotide
  source 1..20: mol_type = other DNA
ggacctgaggatggaccgcg

SEQ ID NO: 718 - DNA, 20 bp, synthetic construct
  misc_feature 1..20: note = Description of Artificial Sequence: Synthetic oligonucleotide
  source 1..20: mol_type = other DNA
ctgtagaaaggcatgaagca

SEQ ID NO: 719 - DNA, 20 bp, synthetic construct
  misc_feature 1..20: note = Description of Artificial Sequence: Synthetic oligonucleotide
  source 1..20: mol_type = other DNA
ctgtagaaaggcatgaagca

SEQ ID NO: 720 - DNA, 20 bp, synthetic construct
  misc_feature 1..20: note = Description of Artificial Sequence: Synthetic oligonucleotide
  source 1..20: mol_type = other DNA
ccactgtagaaaggcatgaa

SEQ ID NO: 721 - DNA, 20 bp, synthetic construct
  misc_feature 1..20: note = Description of Artificial Sequence: Synthetic oligonucleotide
  source 1..20: mol_type = other DNA
ccactgtagaaaggcatgaa

SEQ ID NO: 722 - DNA, 20 bp, synthetic construct
  misc_feature 1..20: note = Description of Artificial Sequence: Synthetic oligonucleotide
  source 1..20: mol_type = other DNA
ctgtagaaaggcatgaagca

SEQ ID NO: 723 - DNA, 20 bp, synthetic construct
  misc_feature 1..20: note = Description of Artificial Sequence: Synthetic oligonucleotide
  source 1..20: mol_type = other DNA
ctgtagaaaggcatgaagca

SEQ ID NO: 724 - RNA, 20 nt, synthetic construct
  misc_feature 1..20: note = Description of Artificial Sequence: Synthetic oligonucleotide
  source 1..20: mol_type = other RNA
catgaagcaggaacatacca

SEQ ID NO: 725 - RNA, 20 nt, synthetic construct
  misc_feature 1..20: note = Description of Artificial Sequence: Synthetic oligonucleotide
  source 1..20: mol_type = other RNA
gcatgaagcaggaacatacc

SEQ ID NO: 726 - RNA, 20 nt, synthetic construct
  misc_feature 1..20: note = Description of Artificial Sequence: Synthetic oligonucleotide
  source 1..20: mol_type = other RNA
ggcatgaagcaggaacatac

SEQ ID NO: 727 - DNA, 20 bp, synthetic construct
  misc_feature 1..20: note = Synthetic oligonucleotide
  modified_base 19: mod_base = OTHER; note = uracil
  source 1..20: mol_type = other DNA
aggcatgaagcaggaacata

SEQ ID NO: 728 - DNA, 20 bp, synthetic construct
  misc_feature 1..20: note = Synthetic oligonucleotide
  modified_base 20: mod_base = OTHER; note = uracil
  source 1..20: mol_type = other DNA
aaggcatgaagcaggaacat

SEQ ID NO: 729 - DNA, 20 bp, synthetic construct
  misc_feature 1..20: note = Description of Artificial Sequence: Synthetic oligonucleotide
  source 1..20: mol_type = other DNA
aaaggcatgaagcaggaaca

SEQ ID NO: 730 - DNA, 20 bp, synthetic construct
  misc_feature 1..20: note = Description of Artificial Sequence: Synthetic oligonucleotide
  source 1..20: mol_type = other DNA
gaaaggcatgaagcaggaac

SEQ ID NO: 731 - DNA, 20 bp, synthetic construct
  misc_feature 1..20: note = Description of Artificial Sequence: Synthetic oligonucleotide
  source 1..20: mol_type = other DNA
agaaaggcatgaagcaggaa

SEQ ID NO: 732 - DNA, 20 bp, synthetic construct
  misc_feature 1..20: note = Synthetic oligonucleotide
  modified_base 1: mod_base = OTHER; note = uracil
  source 1..20: mol_type = other DNA
tagaaaggcatgaagcagga

SEQ ID NO: 733 - DNA, 20 bp, synthetic construct
  misc_feature 1..20: note = Synthetic oligonucleotide
  modified_base 2: mod_base = OTHER; note = uracil
  source 1..20: mol_type = other DNA
gtagaaaggcatgaagcagg

SEQ ID NO: 734 - DNA, 20 bp, synthetic construct
  misc_feature 1..20: note = Synthetic oligonucleotide
  modified_base 1: mod_base = OTHER; note = uracil
  modified_base 3: mod_base = OTHER; note = uracil
  source 1..20: mol_type = other DNA
tgtagaaaggcatgaagcag

SEQ ID NO: 735 - DNA, 20 bp, synthetic construct
  misc_feature 1..20: note = Synthetic oligonucleotide
  modified_base 2: mod_base = OTHER; note = uracil
  modified_base 4: mod_base = OTHER; note = uracil
  source 1..20: mol_type = other DNA
ctgtagaaaggcatgaagca

SEQ ID NO: 736 - DNA, 20 bp, synthetic construct
  misc_feature 1..20: note = Synthetic oligonucleotide
  modified_base 3: mod_base = OTHER; note = uracil
  modified_base 5: mod_base = OTHER; note = uracil
  source 1..20: mol_type = other DNA
actgtagaaaggcatgaagc

SEQ ID NO: 737 - DNA, 20 bp, synthetic construct
  misc_feature 1..20: note = Synthetic oligonucleotide
  modified_base 4: mod_base = OTHER; note = uracil
  modified_base 16: mod_base = OTHER; note = uracil
  source 1..20: mol_type = other DNA
cactgtagaaaggcatgaag

SEQ ID NO: 738 - DNA, 20 bp, synthetic construct
  misc_feature 1..20: note = Synthetic oligonucleotide
  modified_base 5: mod_base = OTHER; note = uracil
  modified_base 17: mod_base = OTHER; note = uracil
  source 1..20: mol_type = other DNA
ccactgtagaaaggcatgaa

SEQ ID NO: 739 - DNA, 20 bp, synthetic construct
  misc_feature 1..20: note = Synthetic oligonucleotide
  modified_base 18: mod_base = OTHER; note = uracil
  source 1..20: mol_type = other DNA
gccactgtagaaaggcatga

SEQ ID NO: 740 - DNA, 20 bp, synthetic construct
  misc_feature 1..20: note = Synthetic oligonucleotide
  modified_base 19: mod_base = OTHER; note = uracil
  source 1..20: mol_type = other DNA
ggccactgtagaaaggcatg

SEQ ID NO: 741 - DNA, 20 bp, synthetic construct
  misc_feature 1..20: note = Synthetic oligonucleotide
  modified_base 20: mod_base = OTHER; note = uracil
  source 1..20: mol_type = other DNA
aggccactgtagaaaggcat

SEQ ID NO: 742 - DNA, 20 bp, synthetic construct
  misc_feature 1..20: note = Description of Artificial Sequence: Synthetic oligonucleotide
  source 1..20: mol_type = other DNA
aaggccactgtagaaaggca

SEQ ID NO: 743 - DNA, 20 bp, synthetic construct
  misc_feature 1..20: note = Synthetic oligonucleotide
  modified_base 1: mod_base = OTHER; note = uracil
  source 1..20: mol_type = other DNA
taaggccactgtagaaaggc

SEQ ID NO: 744 - DNA, 20 bp, synthetic construct
  misc_feature 1..20: note = Synthetic oligonucleotide
  modified_base 2: mod_base = OTHER; note = uracil
  source 1..20: mol_type = other DNA
ataaggccactgtagaaagg

SEQ ID NO: 745 - DNA, 20 bp, synthetic construct
  misc_feature 1..20: note = Synthetic oligonucleotide
  modified_base 3: mod_base = OTHER; note = uracil
  source 1..20: mol_type = other DNA
gataaggccactgtagaaag

SEQ ID NO: 746 - DNA, 20 bp, synthetic construct
  misc_feature 1..20: note = Synthetic oligonucleotide
  modified_base 4: mod_base = OTHER; note = uracil
  source 1..20: mol_type = other DNA
ggataaggccactgtagaaa

SEQ ID NO: 747 - DNA, 20 bp, synthetic construct
  misc_feature 1..20: note = Description of Artificial Sequence: Synthetic oligonucleotide
  source 1..20: mol_type = other DNA
catgaagcaggaacatacca

SEQ ID NO: 748 - DNA, 20 bp, synthetic construct
  misc_feature 1..20: note = Description of Artificial Sequence: Synthetic oligonucleotide
  source 1..20: mol_type = other DNA
gcatgaagcaggaacatacc

SEQ ID NO: 749 - DNA, 20 bp, synthetic construct
  misc_feature 1..20: note = Description of Artificial Sequence: Synthetic oligonucleotide
  source 1..20: mol_type = other DNA
ggcatgaagcaggaacatac

SEQ ID NO: 750 - DNA, 20 bp, synthetic construct
  misc_feature 1..20: note = Description of Artificial Sequence: Synthetic oligonucleotide
  source 1..20: mol_type = other DNA
aggcatgaagcaggaacata

SEQ ID NO: 751 - DNA, 20 bp, synthetic construct
  misc_feature 1..20: note = Description of Artificial Sequence: Synthetic oligonucleotide
  source 1..20: mol_type = other DNA
aaggcatgaagcaggaacat

SEQ ID NO: 752 - DNA, 20 bp, synthetic construct
  misc_feature 1..20: note = Description of Artificial Sequence: Synthetic oligonucleotide
  source 1..20: mol_type = other DNA
aaaggcatgaagcaggaaca

SEQ ID NO: 753 - DNA, 20 bp, synthetic construct
  misc_feature 1..20: note = Description of Artificial Sequence: Synthetic oligonucleotide
  source 1..20: mol_type = other DNA
gaaaggcatgaagcaggaac

SEQ ID NO: 754 - DNA, 20 bp, synthetic construct
  misc_feature 1..20: note = Description of Artificial Sequence: Synthetic oligonucleotide
  source 1..20: mol_type = other DNA
agaaaggcatgaagcaggaa

SEQ ID NO: 755 - DNA, 20 bp, synthetic construct
  misc_feature 1..20: note = Description of Artificial Sequence: Synthetic oligonucleotide
  source 1..20: mol_type = other DNA
tagaaaggcatgaagcagga

SEQ ID NO: 756 - DNA, 20 bp, synthetic construct
  misc_feature 1..20: note = Description of Artificial Sequence: Synthetic oligonucleotide
  source 1..20: mol_type = other DNA
gtagaaaggcatgaagcagg

SEQ ID NO: 757 - DNA, 20 bp, synthetic construct
  misc_feature 1..20: note = Description of Artificial Sequence: Synthetic oligonucleotide
  source 1..20: mol_type = other DNA
tgtagaaaggcatgaagcag

SEQ ID NO: 758 - DNA, 20 bp, synthetic construct
  misc_feature 1..20: note = Description of Artificial Sequence: Synthetic oligonucleotide
  source 1..20: mol_type = other DNA
ctgtagaaaggcatgaagca

SEQ ID NO: 759 - DNA, 20 bp, synthetic construct
  misc_feature 1..20: note = Description of Artificial Sequence: Synthetic oligonucleotide
  source 1..20: mol_type = other DNA
actgtagaaaggcatgaagc

SEQ ID NO: 760 - DNA, 20 bp, synthetic construct
  misc_feature 1..20: note = Description of Artificial Sequence: Synthetic oligonucleotide
  source 1..20: mol_type = other DNA
cactgtagaaaggcatgaag

SEQ ID NO: 761 - DNA, 20 bp, synthetic construct
  misc_feature 1..20: note = Description of Artificial Sequence: Synthetic oligonucleotide
  source 1..20: mol_type = other DNA
ccactgtagaaaggcatgaa

SEQ ID NO: 762 - DNA, 20 bp, synthetic construct
  misc_feature 1..20: note = Description of Artificial Sequence: Synthetic oligonucleotide
  source 1..20: mol_type = other DNA
gccactgtagaaaggcatga

SEQ ID NO: 763 - DNA, 20 bp, synthetic construct
  misc_feature 1..20: note = Description of Artificial Sequence: Synthetic oligonucleotide
  source 1..20: mol_type = other DNA
ggccactgtagaaaggcatg

SEQ ID NO: 764 - DNA, 20 bp, synthetic construct
  misc_feature 1..20: note = Description of Artificial Sequence: Synthetic oligonucleotide
  source 1..20: mol_type = other DNA
aggccactgtagaaaggcat

SEQ ID NO: 765 - DNA, 20 bp, synthetic construct
  misc_feature 1..20: note = Description of Artificial Sequence: Synthetic oligonucleotide
  source 1..20: mol_type = other DNA
aaggccactgtagaaaggca

SEQ ID NO: 766 - DNA, 20 bp, synthetic construct
  misc_feature 1..20: note = Description of Artificial Sequence: Synthetic oligonucleotide
  source 1..20: mol_type = other DNA
taaggccactgtagaaaggc

SEQ ID NO: 767 - DNA, 20 bp, synthetic construct
  misc_feature 1..20: note = Description of Artificial Sequence: Synthetic oligonucleotide
  source 1..20: mol_type = other DNA
ataaggccactgtagaaagg

SEQ ID NO: 768 - DNA, 20 bp, synthetic construct
  misc_feature 1..20: note = Description of Artificial Sequence: Synthetic oligonucleotide
  source 1..20: mol_type = other DNA
gataaggccactgtagaaag

SEQ ID NO: 769 - DNA, 20 bp, synthetic construct
  misc_feature 1..20: note = Description of Artificial Sequence: Synthetic oligonucleotide
  source 1..20: mol_type = other DNA
ggataaggccactgtagaaa

SEQ ID NO: 770 - RNA, 20 nt, synthetic construct
  misc_feature 1..20: note = Description of Artificial Sequence: Synthetic oligonucleotide
  source 1..20: mol_type = other RNA
catgaagcaggaacatacca

SEQ ID NO: 771 - RNA, 20 nt, synthetic construct
  misc_feature 1..20: note = Description of Artificial Sequence: Synthetic oligonucleotide
  source 1..20: mol_type = other RNA
gcatgaagcaggaacatacc

SEQ ID NO: 772 - RNA, 20 nt, synthetic construct
  misc_feature 1..20: note = Description of Artificial Sequence: Synthetic oligonucleotide
  source 1..20: mol_type = other RNA
ggcatgaagcaggaacatac

SEQ ID NO: 773 - DNA, 20 bp, synthetic construct
  misc_feature 1..20: note = Synthetic oligonucleotide
  modified_base 19: mod_base = OTHER; note = uracil
  source 1..20: mol_type = other DNA
aggcatgaagcaggaacata

SEQ ID NO: 774 - DNA, 20 bp, synthetic construct
  misc_feature 1..20: note = Description of Artificial Sequence: Synthetic oligonucleotide
  source 1..20: mol_type = other DNA
aaggcatgaagcaggaacat

SEQ ID NO: 775 - DNA, 20 bp, synthetic construct
  misc_feature 1..20: note = Description of Artificial Sequence: Synthetic oligonucleotide
  source 1..20: mol_type = other DNA
aaaggcatgaagcaggaaca

SEQ ID NO: 776 - DNA, 20 bp, synthetic construct
  misc_feature 1..20: note = Description of Artificial Sequence: Synthetic oligonucleotide
  source 1..20: mol_type = other DNA
gaaaggcatgaagcaggaac

SEQ ID NO: 777 - DNA, 20 bp, synthetic construct
  misc_feature 1..20: note = Description of Artificial Sequence: Synthetic oligonucleotide
  source 1..20: mol_type = other DNA
agaaaggcatgaagcaggaa

SEQ ID NO: 778 - DNA, 20 bp, synthetic construct
  misc_feature 1..20: note = Description of Artificial Sequence: Synthetic oligonucleotide
  source 1..20: mol_type = other DNA
tagaaaggcatgaagcagga

SEQ ID NO: 779 - DNA, 20 bp, synthetic construct
  misc_feature 1..20: note = Synthetic oligonucleotide
  modified_base 2: mod_base = OTHER; note = uracil
  source 1..20: mol_type = other DNA
gtagaaaggcatgaagcagg

SEQ ID NO: 780 - DNA, 20 bp, synthetic construct
  misc_feature 1..20: note = Synthetic oligonucleotide
  modified_base 3: mod_base = OTHER; note = uracil
  source 1..20: mol_type = other DNA
tgtagaaaggcatgaagcag

SEQ ID NO: 781 - DNA, 20 bp, synthetic construct
  misc_feature 1..20: note = Synthetic oligonucleotide
  modified_base 2: mod_base = OTHER; note = uracil
  modified_base 4: mod_base = OTHER; note = uracil
  source 1..20: mol_type = other DNA
ctgtagaaaggcatgaagca

SEQ ID NO: 782 - DNA, 20 bp, synthetic construct
  misc_feature 1..20: note = Synthetic oligonucleotide
  modified_base 3: mod_base = OTHER; note = uracil
  modified_base 5: mod_base = OTHER; note = uracil
  source 1..20: mol_type = other DNA
actgtagaaaggcatgaagc

SEQ ID NO: 783 - DNA, 20 bp, synthetic construct
  misc_feature 1..20: note = Synthetic oligonucleotide
  modified_base 4: mod_base = OTHER; note = uracil
  modified_base 16: mod_base = OTHER; note = uracil
  source 1..20: mol_type = other DNA
cactgtagaaaggcatgaag

SEQ ID NO: 784 - DNA, 20 bp, synthetic construct
  misc_feature 1..20: note = Synthetic oligonucleotide
  modified_base 5: mod_base = OTHER; note = uracil
  modified_base 17: mod_base = OTHER; note = uracil
  source 1..20: mol_type = other DNA
ccactgtagaaaggcatgaa

SEQ ID NO: 785 - DNA, 20 bp, synthetic construct
  misc_feature 1..20: note = Synthetic oligonucleotide
  modified_base 18: mod_base = OTHER; note = uracil
  source 1..20: mol_type = other DNA
gccactgtagaaaggcatga

SEQ ID NO: 786 - DNA, 20 bp, synthetic construct
  misc_feature 1..20: note = Synthetic oligonucleotide
  modified_base 19: mod_base = OTHER; note = uracil
  source 1..20: mol_type = other DNA
ggccactgtagaaaggcatg

SEQ ID NO: 787 - DNA, 20 bp, synthetic construct
  misc_feature 1..20: note = Description of Artificial Sequence: Synthetic oligonucleotide
  source 1..20: mol_type = other DNA
aggccactgtagaaaggcat

SEQ ID NO: 788 - DNA, 20 bp, synthetic construct
  misc_feature 1..20: note = Description of Artificial Sequence: Synthetic oligonucleotide
  source 1..20: mol_type = other DNA
aaggccactgtagaaaggca

SEQ ID NO: 789 - DNA, 20 bp, synthetic construct
  misc_feature 1..20: note = Description of Artificial Sequence: Synthetic oligonucleotide
  source 1..20: mol_type = other DNA
taaggccactgtagaaaggc

SEQ ID NO: 790 - DNA, 20 bp, synthetic construct
  misc_feature 1..20: note = Synthetic oligonucleotide
  modified_base 2: mod_base = OTHER; note = uracil
  source 1..20: mol_type = other DNA
ataaggccactgtagaaagg

SEQ ID NO: 791 - DNA, 20 bp, synthetic construct
  misc_feature 1..20: note = Synthetic oligonucleotide
  modified_base 3: mod_base = OTHER; note = uracil
  source 1..20: mol_type = other DNA
gataaggccactgtagaaag

SEQ ID NO: 792 - DNA, 20 bp, synthetic construct
  misc_feature 1..20: note = Synthetic oligonucleotide
  modified_base 4: mod_base = OTHER; note = uracil
  source 1..20: mol_type = other DNA
ggataaggccactgtagaaa

SEQ ID NO: 793 - DNA, 20 bp, synthetic construct
  misc_feature 1..20: note = Description of Artificial Sequence: Synthetic oligonucleotide
  source 1..20: mol_type = other DNA
catgaagcaggaacatacca

SEQ ID NO: 794 - DNA, 20 bp, synthetic construct
  misc_feature 1..20: note = Description of Artificial Sequence: Synthetic oligonucleotide
  source 1..20: mol_type = other DNA
gcatgaagcaggaacatacc

SEQ ID NO: 795 - DNA, 20 bp, synthetic construct
  misc_feature 1..20: note = Description of Artificial Sequence: Synthetic oligonucleotide
  source 1..20: mol_type = other DNA
ggcatgaagcaggaacatac

SEQ ID NO: 796 - DNA, 20 bp, synthetic construct
  misc_feature 1..20: note = Description of Artificial Sequence: Synthetic oligonucleotide
  source 1..20: mol_type = other DNA
aggcatgaagcaggaacata

SEQ ID NO: 797 - DNA, 20 bp, synthetic construct
  misc_feature 1..20: note = Description of Artificial Sequence: Synthetic oligonucleotide
  source 1..20: mol_type = other DNA
aaggcatgaagcaggaacat

SEQ ID NO: 798 - DNA, 20 bp, synthetic construct
  misc_feature 1..20: note = Description of Artificial Sequence: Synthetic oligonucleotide
  source 1..20: mol_type = other DNA
aaaggcatgaagcaggaaca

SEQ ID NO: 799 - DNA, 20 bp, synthetic construct
  misc_feature 1..20: note = Description of Artificial Sequence: Synthetic oligonucleotide
  source 1..20: mol_type = other DNA
gaaaggcatgaagcaggaac

SEQ ID NO: 800 - DNA, 20 bp, synthetic construct
  misc_feature 1..20: note = Description of Artificial Sequence: Synthetic oligonucleotide
  source 1..20: mol_type = other DNA
agaaaggcatgaagcaggaa

SEQ ID NO: 801 - DNA, 20 bp, synthetic construct
  misc_feature 1..20: note = Description of Artificial Sequence: Synthetic oligonucleotide
  source 1..20: mol_type = other DNA
tagaaaggcatgaagcagga

SEQ ID NO: 802 - DNA, 20 bp, synthetic construct
  misc_feature 1..20: note = Description of Artificial Sequence: Synthetic oligonucleotide
  source 1..20: mol_type = other DNA
gtagaaaggcatgaagcagg

SEQ ID NO: 803 - DNA, 20 bp, synthetic construct
  misc_feature 1..20: note = Description of Artificial Sequence: Synthetic oligonucleotide
  source 1..20: mol_type = other DNA
tgtagaaaggcatgaagcag

SEQ ID NO: 804 - DNA, 20 bp, synthetic construct
  misc_feature 1..20: note = Description of Artificial Sequence: Synthetic oligonucleotide
  source 1..20: mol_type = other DNA
ctgtagaaaggcatgaagca

SEQ ID NO: 805 - DNA, 20 bp, synthetic construct
  misc_feature 1..20: note = Description of Artificial Sequence: Synthetic oligonucleotide
  source 1..20: mol_type = other DNA
actgtagaaaggcatgaagc

SEQ ID NO: 806 - DNA, 20 bp, synthetic construct
  misc_feature 1..20: note = Description of Artificial Sequence: Synthetic oligonucleotide
  source 1..20: mol_type = other DNA
cactgtagaaaggcatgaag

SEQ ID NO: 807 - DNA, 20 bp, synthetic construct
  misc_feature 1..20: note = Description of Artificial Sequence: Synthetic oligonucleotide
  source 1..20: mol_type = other DNA
ccactgtagaaaggcatgaa

SEQ ID NO: 808 - DNA, 20 bp, synthetic construct
  misc_feature 1..20: note = Description of Artificial Sequence: Synthetic oligonucleotide
  source 1..20: mol_type = other DNA
gccactgtagaaaggcatga

SEQ ID NO: 809 - DNA, 20 bp, synthetic construct
  misc_feature 1..20: note = Description of Artificial Sequence: Synthetic oligonucleotide
  source 1..20: mol_type = other DNA
ggccactgtagaaaggcatg

SEQ ID NO: 810 - DNA, 20 bp, synthetic construct
  misc_feature 1..20: note = Description of Artificial Sequence: Synthetic oligonucleotide
  source 1..20: mol_type = other DNA
aggccactgtagaaaggcat

SEQ ID NO: 811 - DNA, 20 bp, synthetic construct
  misc_feature 1..20: note = Description of Artificial Sequence: Synthetic oligonucleotide
  source 1..20: mol_type = other DNA
aaggccactgtagaaaggca

SEQ ID NO: 812 - DNA, 20 bp, synthetic construct
  misc_feature 1..20: note = Description of Artificial Sequence: Synthetic oligonucleotide
  source 1..20: mol_type = other DNA
taaggccactgtagaaaggc

SEQ ID NO: 813 - DNA, 20 bp, synthetic construct
  misc_feature 1..20: note = Description of Artificial Sequence: Synthetic oligonucleotide
  source 1..20: mol_type = other DNA
ataaggccactgtagaaagg

SEQ ID NO: 814 - DNA, 20 bp, synthetic construct
  misc_feature 1..20: note = Description of Artificial Sequence: Synthetic oligonucleotide
  source 1..20: mol_type = other DNA
gataaggccactgtagaaag

SEQ ID NO: 815 - DNA, 20 bp, synthetic construct
  misc_feature 1..20: note = Description of Artificial Sequence: Synthetic oligonucleotide
  source 1..20: mol_type = other DNA
ggataaggccactgtagaaa

SEQ ID NO: 816 - DNA, 45 bp, synthetic construct; identical to SEQ ID NO: 686
  misc_feature 1..45: note = Synthetic oligonucleotide
  modified_base 7: mod_base = OTHER; note = uracil
  modified_base 9: mod_base = OTHER; note = uracil
  modified_base 19: mod_base = OTHER; note = uracil
  modified_base 21: mod_base = OTHER; note = uracil
  source 1..45: mol_type = other DNA

SEQ ID NO: 817 - DNA, 45 bp, synthetic construct; identical to SEQ ID NO: 686
  misc_feature 1..45: note = Synthetic oligonucleotide
  modified_base 7: mod_base = OTHER; note = uracil
  modified_base 9: mod_base = OTHER; note = uracil
  modified_base 19: mod_base = OTHER; note = uracil
  modified_base 21: mod_base = OTHER; note = uracil
  source 1..45: mol_type = other DNA

SEQ ID NO: 818 - DNA, 45 bp, synthetic construct; identical to SEQ ID NO: 686
  misc_feature 1..45: note = Synthetic oligonucleotide
  modified_base 7: mod_base = OTHER; note = uracil
  modified_base 9: mod_base = OTHER; note = uracil
  modified_base 19: mod_base = OTHER; note = uracil
  modified_base 21: mod_base = OTHER; note = uracil
  source 1..45: mol_type = other DNA

SEQ ID NO: 819 - DNA, 45 bp, synthetic construct; identical to SEQ ID NO: 686
  misc_feature 1..45: note = Synthetic oligonucleotide
  modified_base 7: mod_base = OTHER; note = uracil
  modified_base 9: mod_base = OTHER; note = uracil
  modified_base 19: mod_base = OTHER; note = uracil
  modified_base 21: mod_base = OTHER; note = uracil
  source 1..45: mol_type = other DNA

SEQ ID NO: 820 - DNA, 45 bp, synthetic construct; identical to SEQ ID NO: 686
  misc_feature 1..45: note = Synthetic oligonucleotide
  modified_base 7: mod_base = OTHER; note = uracil
  modified_base 9: mod_base = OTHER; note = uracil
  modified_base 19: mod_base = OTHER; note = uracil
  modified_base 21: mod_base = OTHER; note = uracil
  source 1..45: mol_type = other DNA

SEQ ID NO: 821 - RNA, 44 nt, synthetic construct
  misc_feature 1..44: note = Description of Artificial Sequence: Synthetic oligonucleotide
  source 1..44: mol_type = other RNA
ttggtatgttcctgcttcatgcctttctacagtggccttatccc

SEQ ID NO: 822 - RNA, 44 nt, synthetic construct
  misc_feature 1..44: note = Description of Artificial Sequence: Synthetic oligonucleotide
  source 1..44: mol_type = other RNA
ttggtatgttcctgcttcatccccttctacagtggccttatccc

SEQ ID NO: 823 - DNA, 20 bp, synthetic construct
  misc_feature 1..20: note = Description of Artificial Sequence: Synthetic oligonucleotide
  source 1..20: mol_type = other DNA
ctgtagaaaggcatgaagca

SEQ ID NO: 824 - DNA, 20 bp, synthetic construct
  misc_feature 1..20: note = Description of Artificial Sequence: Synthetic oligonucleotide
  source 1..20: mol_type = other DNA
ctgtagaaaggcatgaagca

SEQ ID NO: 825 - DNA, 20 bp, synthetic construct
  misc_feature 1..20: note = Description of Artificial Sequence: Synthetic oligonucleotide
  source 1..20: mol_type = other DNA
ccactgtagaaaggcatgaa

SEQ ID NO: 826 - DNA, 20 bp, synthetic construct
  misc_feature 1..20: note = Description of Artificial Sequence: Synthetic oligonucleotide
  source 1..20: mol_type = other DNA
ccactgtagaaaggcatgaa

SEQ ID NO: 827 - DNA, 20 bp, synthetic construct
  misc_feature 1..20: note = Description of Artificial Sequence: Synthetic oligonucleotide
  source 1..20: mol_type = other DNA
ctgtagaaaggcatgaagca

SEQ ID NO: 828 - DNA, 20 bp, synthetic construct
  misc_feature 1..20: note = Description of Artificial Sequence: Synthetic oligonucleotide
  source 1..20: mol_type = other DNA
ctgtagaaaggcatgaagca

SEQ ID NO: 829 - RNA, 20 nt, synthetic construct
  misc_feature 1..20: note = Description of Artificial Sequence: Synthetic oligonucleotide
  source 1..20: mol_type = other RNA
ccttccctgaaggttcctcc

SEQ ID NO: 830 - DNA, 23 bp, synthetic construct
  misc_feature 1..23: note = Synthetic oligonucleotide
  modified_base 7: mod_base = OTHER; note = uracil
  modified_base 9: mod_base = OTHER; note = uracil
  modified_base 19: mod_base = OTHER; note = uracil
  modified_base 23: mod_base = OTHER; note = uracil
  source 1..23: mol_type = other DNA
tgccactgtagaaaggcatgatt

SEQ ID NO: 831 - DNA, 20 bp, synthetic construct
  misc_feature 1..20: note = Description of Artificial Sequence: Synthetic oligonucleotide
  source 1..20: mol_type = other DNA
ctgtagaaaggcatgaagca

SEQ ID NO: 832 - DNA, 20 bp, synthetic construct
  misc_feature 1..20: note = Description of Artificial Sequence: Synthetic oligonucleotide
  source 1..20: mol_type = other DNA
ctgtagaaaggcatgaagca

SEQ ID NO: 833 - DNA, 20 bp, synthetic construct
  misc_feature 1..20: note = Description of Artificial Sequence: Synthetic oligonucleotide
  source 1..20: mol_type = other DNA
ctgtagaaaggcatgaagca

SEQ ID NO: 834 - DNA, 20 bp, synthetic construct
  misc_feature 1..20: note = Description of Artificial Sequence: Synthetic oligonucleotide
  source 1..20: mol_type = other DNA
ctgtagaaaggcatgaagca

SEQ ID NO: 835 - DNA, 20 bp, synthetic construct
  misc_feature 1..20: note = Synthetic oligonucleotide
  modified_base 5: mod_base = OTHER; note = uracil
  source 1..20: mol_type = other DNA
ccactgtagaaaggcatgaa

SEQ ID NO: 836 - DNA, 20 bp, synthetic construct
  misc_feature 1..20: note = Description of Artificial Sequence: Synthetic oligonucleotide
  source 1..20: mol_type = other DNA
ccactgtagaaaggcatgaa

SEQ ID NO: 837 - DNA, 20 bp, synthetic construct
  misc_feature 1..20: note = Synthetic oligonucleotide
  modified_base 5: mod_base = OTHER; note = uracil
  source 1..20: mol_type = other DNA
ccactgtagaaaggcatgaa

SEQ ID NO: 838 - DNA, 20 bp, synthetic construct
  misc_feature 1..20: note = Description of Artificial Sequence: Synthetic oligonucleotide
  source 1..20: mol_type = other DNA
ccactgtagaaaggcatgaa

SEQ ID NO: 839 - DNA, 20 bp, synthetic construct
  misc_feature 1..20: note = Description of Artificial Sequence: Synthetic oligonucleotide
  source 1..20: mol_type = other DNA
ctgtagaaaggcatgaagca

SEQ ID NO: 840 - DNA, 20 bp, synthetic construct
  misc_feature 1..20: note = Description of Artificial Sequence: Synthetic oligonucleotide
  source 1..20: mol_type = other DNA
ccactgtagaaaggcatgaa

SEQ ID NO: 841 - DNA, 45 bp, synthetic construct; identical to SEQ ID NO: 686
  misc_feature 1..45: note = Synthetic oligonucleotide
  modified_base 7: mod_base = OTHER; note = uracil
  modified_base 9: mod_base = OTHER; note = uracil
  modified_base 19: mod_base = OTHER; note = uracil
  modified_base 21: mod_base = OTHER; note = uracil
  source 1..45: mol_type = other DNA

SEQ ID NO: 842 - DNA, 20 bp, synthetic construct
  misc_feature 1..20: note = Description of Artificial Sequence: Synthetic oligonucleotide
  source 1..20: mol_type = other DNA
ggacctgaggatggaccgcg

SEQ ID NO: 843 - DNA, 20 bp, synthetic construct
  misc_feature 1..20: note = Description of Artificial Sequence: Synthetic oligonucleotide
  source 1..20: mol_type = other DNA
ggacctgaggatggaccgcg

SEQ ID NO: 844 - DNA, 20 bp, synthetic construct
  misc_feature 1..20: note = Description of Artificial Sequence: Synthetic oligonucleotide
  source 1..20: mol_type = other DNA
ggacctgaggatggaccgcg

SEQ ID NO: 845 - DNA, 20 bp, synthetic construct
  misc_feature 1..20: note = Description of Artificial Sequence: Synthetic oligonucleotide
  source 1..20: mol_type = other DNA
ggacctgaggatggaccgcg

SEQ ID NO: 846 - DNA, 23 bp, synthetic construct
  misc_feature 1..23: note = Synthetic oligonucleotide
  modified_base 7: mod_base = OTHER; note = uracil
  modified_base 9: mod_base = OTHER; note = uracil
  modified_base 19: mod_base = OTHER; note = uracil
  modified_base 23: mod_base = OTHER; note = uracil
  source 1..23: mol_type = other DNA
tgccactgtagaaaggcatgatt

SEQ ID NO: 847 - DNA, 21 bp, synthetic construct
  misc_feature 1..21: note = Synthetic oligonucleotide
  modified_base 7: mod_base = OTHER; note = uracil
  modified_base 9: mod_base = OTHER; note = uracil
  modified_base 19: mod_base = OTHER; note = uracil
  modified_base 21: mod_base = OTHER; note = uracil
  source 1..21: mol_type = other DNA
tgccactgtagaaaggcattt

SEQ ID NO: 848 - DNA, 21 bp, synthetic construct
  misc_feature 1..21: note = Synthetic oligonucleotide
  modified_base 7: mod_base = OTHER; note = uracil
  modified_base 9: mod_base = OTHER; note = uracil
  modified_base 19: mod_base = OTHER; note = uracil
  modified_base 21: mod_base = OTHER; note = uracil
  source 1..21: mol_type = other DNA
tgccactgtagaaaggcattt

SEQ ID NO: 849 - DNA, 21 bp, synthetic construct
  misc_feature 1..21: note = Synthetic oligonucleotide
  modified_base 7: mod_base = OTHER; note = uracil
  modified_base 9: mod_base = OTHER; note = uracil
  modified_base 19: mod_base = OTHER; note = uracil
  modified_base 21: mod_base = OTHER; note = uracil
  source 1..21: mol_type = other DNA
tgccactgtagaaaggcattt

SEQ ID NO: 850 - DNA, 21 bp, synthetic construct
  misc_feature 1..21: note = Synthetic oligonucleotide
  modified_base 7: mod_base = OTHER; note = uracil
  modified_base 9: mod_base = OTHER; note = uracil
  modified_base 19: mod_base = OTHER; note = uracil
  modified_base 21: mod_base = OTHER; note = uracil
  source 1..21: mol_type = other DNA
tgccactgtagaaaggcattt

SEQ ID NO: 851 - DNA, 21 bp, synthetic construct
  misc_feature 1..21: note = Synthetic oligonucleotide
  modified_base 7: mod_base = OTHER; note = uracil
  modified_base 9: mod_base = OTHER; note = uracil
  modified_base 19: mod_base = OTHER; note = uracil
  modified_base 21: mod_base = OTHER; note = uracil
  source 1..21: mol_type = other DNA
tgccactgtagaaaggcattt

SEQ ID NO: 852 - DNA, 21 bp, synthetic construct
  misc_feature 1..21: note = Synthetic oligonucleotide
  modified_base 7: mod_base = OTHER; note = uracil
  modified_base 9: mod_base = OTHER; note = uracil
  modified_base 19: mod_base = OTHER; note = uracil
  modified_base 21: mod_base = OTHER; note = uracil
  source 1..21: mol_type = other DNA
tgccactgtagaaaggcattt

SEQ ID NO: 853 - DNA, 21 bp, synthetic construct
  misc_feature 1..21: note = Synthetic oligonucleotide
  modified_base 7: mod_base = OTHER; note = uracil
  modified_base 9: mod_base = OTHER; note = uracil
  modified_base 19: mod_base = OTHER; note = uracil
  modified_base 21: mod_base = OTHER; note = uracil
  source 1..21: mol_type = other DNA
tgccactgtagaaaggcattt

SEQ ID NO: 854 - DNA, 21 bp, synthetic construct
  misc_feature 1..21: note = Synthetic oligonucleotide
  modified_base 7: mod_base = OTHER; note = uracil
  modified_base 9: mod_base = OTHER; note = uracil
  modified_base 19: mod_base = OTHER; note = uracil
  modified_base 21: mod_base = OTHER; note = uracil
  source 1..21: mol_type = other DNA
tgccactgtagaaaggcattt

SEQ ID NO: 855 - DNA, 23 bp, synthetic construct
  misc_feature 1..23: note = Synthetic oligonucleotide
  modified_base 7: mod_base = OTHER; note = uracil
  modified_base 9: mod_base = OTHER; note = uracil
  modified_base 19: mod_base = OTHER; note = uracil
  modified_base 23: mod_base = OTHER; note = uracil
  source 1..23: mol_type = other DNA
tgccactgtagaaaggcatgatt

SEQ ID NO: 856 - DNA, 23 bp, synthetic construct
  misc_feature 1..23: note = Synthetic oligonucleotide
  modified_base 7: mod_base = OTHER; note = uracil
  modified_base 9: mod_base = OTHER; note = uracil
  modified_base 19: mod_base = OTHER; note = uracil
  modified_base 23: mod_base = OTHER; note = uracil
  source 1..23: mol_type = other DNA
tgccactgtagaaaggcatgatt

SEQ ID NO: 857 - DNA, 23 bp, synthetic construct
  misc_feature 1..23: note = Synthetic oligonucleotide
  modified_base 7: mod_base = OTHER; note = uracil
  modified_base 9: mod_base = OTHER; note = uracil
  modified_base 19: mod_base = OTHER; note = uracil
  modified_base 23: mod_base = OTHER; note = uracil
  source 1..23: mol_type = other DNA
tgccactgtagaaaggcatgatt

SEQ ID NO: 858 - DNA, 23 bp, synthetic construct
  misc_feature 1..23: note = Synthetic oligonucleotide
  modified_base 7: mod_base = OTHER; note = uracil
  modified_base 9: mod_base = OTHER; note = uracil
  modified_base 19: mod_base = OTHER; note = uracil
  modified_base 23: mod_base = OTHER; note = uracil
  source 1..23: mol_type = other DNA
tgccactgtagaaaggcatgatt

SEQ ID NO: 859 - DNA, 23 bp, synthetic construct
  misc_feature 1..23: note = Synthetic oligonucleotide
  modified_base 7: mod_base = OTHER; note = uracil
  modified_base 9: mod_base = OTHER; note = uracil
  modified_base 19: mod_base = OTHER; note = uracil
  modified_base 23: mod_base = OTHER; note = uracil
  source 1..23: mol_type = other DNA
tgccactgtagaaaggcatgatt

SEQ ID NO: 860 - DNA, 23 bp, synthetic construct
  misc_feature 1..23: note = Synthetic oligonucleotide
  modified_base 7: mod_base = OTHER; note = uracil
  modified_base 9: mod_base = OTHER; note = uracil
  modified_base 19: mod_base = OTHER; note = uracil
  modified_base 23: mod_base = OTHER; note = uracil
  source 1..23: mol_type = other DNA
tgccactgtagaaaggcatgatt

SEQ ID NO: 861 - DNA, 23 bp, synthetic construct
  misc_feature 1..23: note = Synthetic oligonucleotide
  modified_base 7: mod_base = OTHER; note = uracil
  modified_base 9: mod_base = OTHER; note = uracil
  modified_base 19: mod_base = OTHER; note = uracil
  modified_base 23: mod_base = OTHER; note = uracil
  source 1..23: mol_type = other DNA
tgccactgtagaaaggcatgatt

SEQ ID NO: 862 - DNA, 23 bp, synthetic construct
  misc_feature 1..23: note = Synthetic oligonucleotide
  modified_base 7: mod_base = OTHER; note = uracil
  modified_base 9: mod_base = OTHER; note = uracil
  modified_base 19: mod_base = OTHER; note = uracil
  modified_base 23: mod_base = OTHER; note = uracil
  source 1..23: mol_type = other DNA
tgccactgtagaaaggcatgatt

SEQ ID NO: 863 - DNA, 20 bp, synthetic construct
  misc_feature 1..20: note = Description of Artificial Sequence: Synthetic oligonucleotide
  source 1..20: mol_type = other DNA
ccactgtagaaaggcatgaa

SEQ ID NO: 864 - DNA, 20 bp, synthetic construct
  misc_feature 1..20: note = Description of Artificial Sequence: Synthetic oligonucleotide
  source 1..20: mol_type = other DNA
ccactgtagaaaggcatgaa

SEQ ID NO: 865 - DNA, 20 bp, synthetic construct
  misc_feature 1..20: note = Description of Artificial Sequence: Synthetic oligonucleotide
  source 1..20: mol_type = other DNA
ccactgtagaaaggcatgaa

SEQ ID NO: 866 - DNA, 20 bp, synthetic construct
  misc_feature 1..20: note = Description of Artificial Sequence: Synthetic oligonucleotide
  source 1..20: mol_type = other DNA
ccactgtagaaaggcatgaa

SEQ ID NO: 867 - DNA, 21 bp, synthetic construct
  misc_feature 1..21: note = Synthetic oligonucleotide
  modified_base 7: mod_base = OTHER; note = uracil
  modified_base 9: mod_base = OTHER; note = uracil
  modified_base 19: mod_base = OTHER; note = uracil
  modified_base 21: mod_base = OTHER; note = uracil
  source 1..21: mol_type = other DNA
tgccactgtagaaaggcattt

SEQ ID NO: 868 - DNA, 23 bp, synthetic construct
  misc_feature 1..23: note = Synthetic oligonucleotide
  modified_base 7: mod_base = OTHER; note = uracil
  modified_base 9: mod_base = OTHER; note = uracil
  modified_base 19: mod_base = OTHER; note = uracil
  modified_base 23: mod_base = OTHER; note = uracil
  source 1..23: mol_type = other DNA
tgccactgtagaaaggcatgatt

SEQ ID NO: 869 - DNA, 21 bp, synthetic construct
  misc_feature 1..21: note = Synthetic oligonucleotide
  modified_base 7: mod_base = OTHER; note = uracil
  modified_base 9: mod_base = OTHER; note = uracil
  modified_base 19: mod_base = OTHER; note = uracil
  modified_base 21: mod_base = OTHER; note = uracil
  source 1..21: mol_type = other DNA
tgccactgtagaaaggcattt

SEQ ID NO: 870 - DNA, 23 bp, synthetic construct
  misc_feature 1..23: note = Synthetic oligonucleotide
  modified_base 7: mod_base = OTHER; note = uracil
  modified_base 9: mod_base = OTHER; note = uracil
  modified_base 19: mod_base = OTHER; note = uracil
  modified_base 23: mod_base = OTHER; note = uracil
  source 1..23: mol_type = other DNA
tgccactgtagaaaggcatgatt

SEQ ID NO: 871 - DNA, 21 bp, synthetic construct
  misc_feature 1..21: note = Synthetic oligonucleotide
  modified_base 7: mod_base = OTHER; note = uracil
  modified_base 9: mod_base = OTHER; note = uracil
  modified_base 19: mod_base = OTHER; note = uracil
  modified_base 21: mod_base = OTHER; note = uracil
  source 1..21: mol_type = other DNA
tgccactgtagaaaggcattt

SEQ ID NO: 872 - DNA, 23 bp, synthetic construct
  misc_feature 1..23: note = Synthetic oligonucleotide
  modified_base 7: mod_base = OTHER; note = uracil
  modified_base 9: mod_base = OTHER; note = uracil
  modified_base 19: mod_base = OTHER; note = uracil
  modified_base 23: mod_base = OTHER; note = uracil
  source 1..23: mol_type = other DNA
tgccactgtagaaaggcatgatt

SEQ ID NO: 873 - DNA, 21 bp, synthetic construct
  misc_feature 1..21: note = Synthetic oligonucleotide
  modified_base 7: mod_base = OTHER; note = uracil
  modified_base 9: mod_base = OTHER; note = uracil
  modified_base 19: mod_base = OTHER; note = uracil
  modified_base 21: mod_base = OTHER; note = uracil
  source 1..21: mol_type = other DNA
tgccactgtagaaaggcattt

SEQ ID NO: 874 - DNA, 23 bp, synthetic construct
  misc_feature 1..23: note = Synthetic oligonucleotide
  modified_base 7: mod_base = OTHER; note = uracil
  modified_base 9: mod_base = OTHER; note = uracil
  modified_base 19: mod_base = OTHER; note = uracil
  modified_base 23: mod_base = OTHER; note = uracil
  source 1..23: mol_type = other DNA
tgccactgtagaaaggcatgatt

SEQ ID NO: 875 - DNA, 20 bp, synthetic construct
  misc_feature 1..20: note = Description of Artificial Sequence: Synthetic oligonucleotide
  source 1..20: mol_type = other DNA
ctgtagaaaggcatgaagca

SEQ ID NO: 876 - DNA, 20 bp, synthetic construct
  misc_feature 1..20: note = Description of Artificial Sequence: Synthetic oligonucleotide
  source 1..20: mol_type = other DNA
ccactgtagaaaggcatgaa

SEQ ID NO: 877 - DNA, 20 bp, synthetic construct
  misc_feature 1..20: note = Description of Artificial Sequence: Synthetic oligonucleotide
  source 1..20: mol_type = other DNA
ctgtagaaaggcatgaagca

SEQ ID NO: 878 - DNA, 20 bp, synthetic construct
  misc_feature 1..20: note = Synthetic oligonucleotide
  modified_base 17: mod_base = OTHER; note = uracil
  source 1..20: mol_type = other DNA
ccactgtagaaaggcatgaa

SEQ ID NO: 879 - DNA, 20 bp, synthetic construct
  misc_feature 1..20: note = Description of Artificial Sequence: Synthetic oligonucleotide
  source 1..20: mol_type = other DNA
ctgtagaaaggcatgaagca

SEQ ID NO: 880 - DNA, 20 bp, synthetic construct
  misc_feature 1..20: note = Synthetic oligonucleotide
  modified_base 5: mod_base = OTHER; note = uracil
  source 1..20: mol_type = other DNA
ccactgtagaaaggcatgaa

SEQ ID NO: 881 - DNA, 20 bp, synthetic construct
  misc_feature 1..20: note = Description of Artificial Sequence: Synthetic oligonucleotide
  source 1..20: mol_type = other DNA
ctgtagaaaggcatgaagca

SEQ ID NO: 882 - DNA, 20 bp, synthetic construct
  misc_feature 1..20: note = Synthetic oligonucleotide
  modified_base 5: mod_base = OTHER; note = uracil
  modified_base 17: mod_base = OTHER; note = uracil
  source 1..20: mol_type = other DNA
ccactgtagaaaggcatgaa

SEQ ID NO: 883 - DNA, 20 bp, synthetic construct
  misc_feature 1..20: note = Description of Artificial Sequence: Synthetic oligonucleotide
  source 1..20: mol_type = other DNA
ctgtagaaaggcatgaagca

SEQ ID NO: 884 - DNA, 20 bp, synthetic construct
  misc_feature 1..20: note = Description of Artificial Sequence: Synthetic oligonucleotide
  source 1..20: mol_type = other DNA
ccactgtagaaaggcatgaa

SEQ ID NO: 885 - DNA, 20 bp, synthetic construct
  misc_feature 1..20: note = Description of Artificial Sequence: Synthetic oligonucleotide
  source 1..20: mol_type = other DNA
ctgtagaaaggcatgaagca

SEQ ID NO: 886 - DNA, 20 bp, synthetic construct
  misc_feature 1..20: note = Description of Artificial Sequence: Synthetic oligonucleotide
  source 1..20: mol_type = other DNA
ctgtagaaaggcatgaagca

SEQ ID NO: 887 - DNA, 20 bp, synthetic construct
  misc_feature 1..20: note = Description of Artificial Sequence: Synthetic oligonucleotide
  source 1..20: mol_type = other DNA
ctgtagaaaggcatgaagca

SEQ ID NO: 888 - DNA, 20 bp, synthetic construct
  misc_feature 1..20: note = Description of Artificial Sequence: Synthetic oligonucleotide
  source 1..20: mol_type = other DNA
ctgtagaaaggcatgaagca

SEQ ID NO: 889 - DNA, 20 bp, synthetic construct
  misc_feature 1..20: note = Description of Artificial Sequence: Synthetic oligonucleotide
  source 1..20: mol_type = other DNA
ctgtagaaaggcatgaagca

SEQ ID NO: 890 - DNA, 20 bp, synthetic construct
  misc_feature 1..20: note = Description of Artificial Sequence: Synthetic oligonucleotide
  source 1..20: mol_type = other DNA
ctgtagaaaggcatgaagca

SEQ ID NO: 891 - DNA, 20 bp, synthetic construct
  misc_feature 1..20: note = Synthetic oligonucleotide
  modified_base 5: mod_base = OTHER; note = uracil
  modified_base 17: mod_base = OTHER; note = uracil
  source 1..20: mol_type = other DNA
ccactgtagaaaggcatgaa

SEQ ID NO: 892 - DNA, 20 bp, synthetic construct
  misc_feature 1..20: note = Description of Artificial Sequence: Synthetic oligonucleotide
  source 1..20: mol_type = other DNA
ctgtagaaaggcatgaagca

SEQ ID NO: 893 - DNA, 20 bp, synthetic construct
  misc_feature 1..20: note = Description of Artificial Sequence: Synthetic oligonucleotide
  source 1..20: mol_type = other DNA
ccactgtagaaaggcatgaa

SEQ ID NO: 894 - DNA, 20 bp, synthetic construct
  misc_feature 1..20: note = Description of Artificial Sequence: Synthetic oligonucleotide
  source 1..20: mol_type = other DNA
ctgtagaaaggcatgaagca

SEQ ID NO: 895 - DNA, 20 bp, synthetic construct
  misc_feature 1..20: note = Description of Artificial Sequence: Synthetic oligonucleotide
  source 1..20: mol_type = other DNA
ctgtagaaaggcatgaagca

SEQ ID NO: 896 - DNA, 20 bp, synthetic construct
  misc_feature 1..20: note = Description of Artificial Sequence: Synthetic oligonucleotide
  source 1..20: mol_type = other DNA
ctgtagaaaggcatgaagca

SEQ ID NO: 897 - DNA, 20 bp, synthetic construct
  misc_feature 1..20: note = Description of Artificial Sequence: Synthetic oligonucleotide
  source 1..20: mol_type = other DNA
ctgtagaaaggcatgaagca

SEQ ID NO: 898 - DNA, 20 bp, synthetic construct
  misc_feature 1..20: note = Description of Artificial Sequence: Synthetic oligonucleotide
  source 1..20: mol_type = other DNA
ctgtagaaaggcatgaagca

SEQ ID NO: 899 - DNA, 20 bp, synthetic construct
  misc_feature 1..20: note = Description of Artificial Sequence: Synthetic oligonucleotide
  source 1..20: mol_type = other DNA
ctgtagaaaggcatgaagca

SEQ ID NO: 900 - DNA, 20 bp, synthetic construct
  misc_feature 1..20: note = Synthetic oligonucleotide
  modified_base 5: mod_base = OTHER; note = uracil
  modified_base 17: mod_base = OTHER; note = uracil
  source 1..20: mol_type = other DNA
ccactgtagaaaggcatgaa

SEQ ID NO: 901 - DNA, 20 bp, synthetic construct
  misc_feature 1..20: note = Description of Artificial Sequence: Synthetic oligonucleotide
  source 1..20: mol_type = other DNA
ctgtagaaaggcatgaagca

SEQ ID NO: 902 - DNA, 20 bp, synthetic construct
  misc_feature 1..20: note = Description of Artificial Sequence: Synthetic oligonucleotide
  source 1..20: mol_type = other DNA
ccactgtagaaaggcatgaa

SEQ ID NO: 903 - DNA, 20 bp, synthetic construct
  misc_feature 1..20: note = Description of Artificial Sequence: Synthetic oligonucleotide
  source 1..20: mol_type = other DNA
ctgtagaaaggcatgaagca

SEQ ID NO: 904 - DNA, 20 bp, synthetic construct
  misc_feature 1..20: note = Description of Artificial Sequence: Synthetic oligonucleotide
  source 1..20: mol_type = other DNA
ctgtagaaaggcatgaagca

SEQ ID NO: 905 - DNA, 20 bp, synthetic construct
  misc_feature 1..20: note = Description of Artificial Sequence: Synthetic oligonucleotide
  source 1..20: mol_type = other DNA
ctgtagaaaggcatgaagca

SEQ ID NO: 906 - DNA, 20 bp, synthetic construct
  misc_feature 1..20: note = Description of Artificial Sequence: Synthetic oligonucleotide
  source 1..20: mol_type = other DNA
ctgtagaaaggcatgaagca

SEQ ID NO: 907 - DNA, 20 bp, synthetic construct
  misc_feature 1..20: note = Description of Artificial Sequence: Synthetic oligonucleotide
  source 1..20: mol_type = other DNA
ctgtagaaaggcatgaagca

SEQ ID NO: 908 - DNA, 20 bp, synthetic construct
  misc_feature 1..20: note = Synthetic oligonucleotide
  modified_base 5: mod_base = OTHER; note = uracil
  modified_base 17: mod_base = OTHER; note = uracil
  source 1..20: mol_type = other DNA
ccactgtagaaaggcatgaa

SEQ ID NO: 909 - DNA, 20 bp, synthetic construct
  misc_feature 1..20: note = Synthetic oligonucleotide
  modified_base 5: mod_base = OTHER; note = uracil
  modified_base 17: mod_base = OTHER; note = uracil
  source 1..20: mol_type = other DNA
ccactgtagaaaggcatgaa

SEQ ID NO: 910 - DNA, 20 bp, synthetic construct
  misc_feature 1..20: note = Synthetic oligonucleotide
  modified_base 5: mod_base = OTHER; note = uracil
  modified_base 17: mod_base = OTHER; note = uracil
  source 1..20: mol_type = other DNA
ccactgtagaaaggcatgaa

SEQ ID NO: 911 - DNA, 23 bp, synthetic construct
  misc_feature 1..23: note = Synthetic oligonucleotide
  modified_base 7: mod_base = OTHER; note = uracil
  modified_base 9: mod_base = OTHER; note = uracil
  modified_base 19: mod_base = OTHER; note = uracil
  modified_base 23: mod_base = OTHER; note = uracil
  source 1..23: mol_type = other DNA
tgccactgtagaaaggcatgatt

SEQ ID NO: 912 - DNA, 23 bp, synthetic construct
  misc_feature 1..23: note = Synthetic oligonucleotide
  modified_base 7: mod_base = OTHER; note = uracil
  modified_base 9: mod_base = OTHER; note = uracil
  modified_base 19: mod_base = OTHER; note = uracil
  modified_base 23: mod_base = OTHER; note = uracil
  source 1..23: mol_type = other DNA
tgccactgtagaaaggcatgatt

SEQ ID NO: 913 - DNA, 23 bp, synthetic construct
  misc_feature 1..23: note = Synthetic oligonucleotide
  modified_base 7: mod_base = OTHER; note = uracil
  modified_base 9: mod_base = OTHER; note = uracil
  modified_base 19: mod_base = OTHER; note = uracil
  modified_base 23: mod_base = OTHER; note = uracil
  source 1..23: mol_type = other DNA
tgccactgtagaaaggcatgatt

SEQ ID NO: 914 - DNA, 23 bp, synthetic construct
  misc_feature 1..23: note = Synthetic oligonucleotide
  modified_base 7: mod_base = OTHER; note = uracil
  modified_base 9: mod_base = OTHER; note = uracil
  modified_base 19: mod_base = OTHER; note = uracil
  modified_base 23: mod_base = OTHER; note = uracil
  source 1..23: mol_type = other DNA
tgccactgtagaaaggcatgatt

SEQ ID NO: 915 - RNA, 24 nt, synthetic construct
  misc_feature 1..24: note = Description of Artificial Sequence: Synthetic oligonucleotide
  source 1..24: mol_type = other RNA
ctgcttcatgcctttctacagtgg

SEQ ID NO: 916 - RNA, 24 nt, synthetic construct
  misc_feature 1..24: note = Description of Artificial Sequence: Synthetic oligonucleotide
  source 1..24: mol_type = other RNA
ctgcttcatccccttctacagtgg

SEQ ID NO: 917 - DNA, 20 bp, synthetic construct
  misc_feature 1..20: note = Synthetic oligonucleotide
  modified_base 1: mod_base = OTHER; note = uracil
  source 1..20: mol_type = other DNA
tgtagaaaggcatgaagcag

SEQ ID NO: 918 - DNA, 20 bp, synthetic construct
  misc_feature 1..20: note = Synthetic oligonucleotide
  modified_base 1: mod_base = OTHER; note = uracil
  modified_base 3: mod_base = OTHER; note = uracil
  source 1..20: mol_type = other DNA
tgtagaaaggcatgaagcag

SEQ ID NO: 919 - DNA, 20 bp, synthetic construct
  misc_feature 1..20: note = Description of Artificial Sequence: Synthetic oligonucleotide
  source 1..20: mol_type = other DNA
tgtagaaaggcatgaagcag

SEQ ID NO: 920 - DNA, 20 bp, synthetic construct
  misc_feature 1..20: note = Synthetic oligonucleotide
  modified_base 1: mod_base = OTHER; note = uracil
  modified_base 3: mod_base = OTHER; note = uracil
  source 1..20: mol_type = other DNA
tgtagaaaggcatgaagcag

SEQ ID NO: 921 - DNA, 20 bp, synthetic construct
  misc_feature 1..20: note = Synthetic oligonucleotide
  modified_base 2: mod_base = OTHER; note = uracil
  modified_base 4: mod_base = OTHER; note = uracil
  source 1..20: mol_type = other DNA
ctgtagaaaggcatgaagca

SEQ ID NO: 922 - DNA, 20 bp, synthetic construct
  misc_feature 1..20: note = Description of Artificial Sequence: Synthetic oligonucleotide
  source 1..20: mol_type = other DNA
ctgtagaaaggcatgaagca

SEQ ID NO: 923 - DNA, 20 bp, synthetic construct
  misc_feature 1..20: note = Synthetic oligonucleotide
  modified_base 2: mod_base = OTHER; note = uracil
  modified_base 4: mod_base = OTHER; note = uracil
  source 1..20: mol_type = other DNA
ctgtagaaaggcatgaagca

SEQ ID NO: 924 - DNA, 20 bp, synthetic construct
  misc_feature 1..20: note = Synthetic oligonucleotide
  modified_base 5: mod_base = OTHER; note = uracil
  source 1..20: mol_type = other DNA
actgtagaaaggcatgaagc

SEQ ID NO: 925 - DNA, 20 bp, synthetic construct
  misc_feature 1..20: note = Synthetic oligonucleotide
  modified_base 3: mod_base = OTHER; note = uracil
  modified_base 5: mod_base = OTHER; note = uracil
  source 1..20: mol_type = other DNA
actgtagaaaggcatgaagc

SEQ ID NO: 926 - DNA, 20 bp, synthetic construct
  misc_feature 1..20: note = Description of Artificial Sequence: Synthetic oligonucleotide
  source 1..20: mol_type = other DNA
actgtagaaaggcatgaagc

SEQ ID NO: 927 - DNA, 20 bp, synthetic construct
  misc_feature 1..20: note = Synthetic oligonucleotide
  modified_base 3: mod_base = OTHER; note = uracil
  modified_base 5: mod_base = OTHER; note = uracil
  source 1..20: mol_type = other DNA
actgtagaaaggcatgaagc

SEQ ID NO: 928 - DNA, 20 bp, synthetic construct
  misc_feature 1..20: note = Synthetic oligonucleotide
  modified_base 16: mod_base = OTHER; note = uracil
  source 1..20: mol_type = other DNA
cactgtagaaaggcatgaag

SEQ ID NO: 929 - DNA, 20 bp, synthetic construct
  misc_feature 1..20: note = Synthetic oligonucleotide
  modified_base 4: mod_base = OTHER; note = uracil
  modified_base 16: mod_base = OTHER; note = uracil
  source 1..20: mol_type = other DNA
cactgtagaaaggcatgaag

SEQ ID NO: 930 - DNA, 20 bp, synthetic construct
  misc_feature 1..20: note = Synthetic oligonucleotide
  modified_base 16: mod_base = OTHER; note = uracil
  source 1..20: mol_type = other DNA
cactgtagaaaggcatgaag

SEQ ID NO: 931 - DNA, 20 bp, synthetic construct
  misc_feature 1..20: note = Synthetic oligonucleotide
  modified_base 4: mod_base = OTHER; note = uracil
  source 1..20: mol_type = other DNA
cactgtagaaaggcatgaag

SEQ ID NO: 932 - DNA, 20 bp, synthetic construct
  misc_feature 1..20: note = Synthetic oligonucleotide
  modified_base 5: mod_base = OTHER; note = uracil
  source 1..20: mol_type = other DNA
ccactgtagaaaggcatgaa

SEQ ID NO: 933 - DNA, 20 bp, synthetic construct
  misc_feature 1..20: note = Synthetic oligonucleotide
  modified_base 17: mod_base = OTHER; note = uracil
  source 1..20: mol_type = other DNA
ccactgtagaaaggcatgaa

SEQ ID NO: 934 - DNA, 20 bp, synthetic construct
  misc_feature 1..20: note = Synthetic oligonucleotide
  modified_base 5: mod_base = OTHER; note = uracil
  source 1..20: mol_type = other DNA
ccactgtagaaaggcatgaa

SEQ ID NO: 935 - DNA, 23 bp, synthetic construct
  misc_feature 1..23: note = Synthetic oligonucleotide
  modified_base 7: mod_base = OTHER; note = uracil
  modified_base 9: mod_base = OTHER; note = uracil
  modified_base 19: mod_base = OTHER; note = uracil
  modified_base 23: mod_base = OTHER; note = uracil
  source 1..23: mol_type = other DNA
tgccactgtagaaaggcatgatt

SEQ ID NO: 936 - DNA, 23 bp, synthetic construct
  misc_feature 1..23: note = Synthetic oligonucleotide
  modified_base 7: mod_base = OTHER; note = uracil
  modified_base 9: mod_base = OTHER; note = uracil
  modified_base 19: mod_base = OTHER; note = uracil
  modified_base 23: mod_base = OTHER; note = uracil
  source 1..23: mol_type = other DNA
tgccactgtagaaaggcatgatt

SEQ ID NO: 937 - DNA, 23 bp, synthetic construct
  misc_feature 1..23: note = Synthetic oligonucleotide
  modified_base 7: mod_base = OTHER; note = uracil
  modified_base 9: mod_base = OTHER; note = uracil
  modified_base 19: mod_base = OTHER; note = uracil
  modified_base 23: mod_base = OTHER; note = uracil
  source 1..23: mol_type = other DNA
tgccactgtagaaaggcatgatt

SEQ ID NO: 938 - DNA, 23 bp, synthetic construct
  misc_feature 1..23: note = Synthetic oligonucleotide
  modified_base 7: mod_base = OTHER; note = uracil
  modified_base 9: mod_base = OTHER; note = uracil
  modified_base 19: mod_base = OTHER; note = uracil
  modified_base 23: mod_base = OTHER; note = uracil
  source 1..23: mol_type = other DNA
tgccactgtagaaaggcatgatt

SEQ ID NO: 939 - DNA, 23 bp, synthetic construct
  misc_feature 1..23: note = Synthetic oligonucleotide
  modified_base 7: mod_base = OTHER; note = uracil
  modified_base 9: mod_base = OTHER; note = uracil
  modified_base 19: mod_base = OTHER; note = uracil
  modified_base 23: mod_base = OTHER; note = uracil
  source 1..23: mol_type = other DNA
tgccactgtagaaaggcatgatt

SEQ ID NO: 940 - DNA, 23 bp, synthetic construct
  misc_feature 1..23: note = Synthetic oligonucleotide
  modified_base 7: mod_base = OTHER; note = uracil
  modified_base 9: mod_base = OTHER; note = uracil
  modified_base 19: mod_base = OTHER; note = uracil
  modified_base 23: mod_base = OTHER; note = uracil
  source 1..23: mol_type = other DNA
tgccactgtagaaaggcatgatt

SEQ ID NO: 941 - DNA, 23 bp, synthetic construct
  misc_feature 1..23: note = Synthetic oligonucleotide
  modified_base 7: mod_base = OTHER; note = uracil
  modified_base 9: mod_base = OTHER; note = uracil
  modified_base 19: mod_base = OTHER; note = uracil
  modified_base 23: mod_base = OTHER; note = uracil
  source 1..23: mol_type = other DNA
tgccactgtagaaaggcatgatt

SEQ ID NO: 942 - DNA, 23 bp, synthetic construct
  misc_feature 1..23: note = Synthetic oligonucleotide
  modified_base 7: mod_base = OTHER; note = uracil
  modified_base 9: mod_base = OTHER; note = uracil
  modified_base 19: mod_base = OTHER; note = uracil
  modified_base 23: mod_base = OTHER; note = uracil
  source 1..23: mol_type = other DNA
tgccactgtagaaaggcatgatt

SEQ ID NO: 943 - DNA, 20 bp, synthetic construct
  misc_feature 1..20: note = Description of Artificial Sequence: Synthetic oligonucleotide
  source 1..20: mol_type = other DNA
tgtagaaagggatgaagcag

SEQ ID NO: 944 - DNA, 20 bp, synthetic construct
  misc_feature 1..20: note = Description of Artificial Sequence: Synthetic oligonucleotide
  source 1..20: mol_type = other DNA
ctgtagaaagggatgaagca

SEQ ID NO: 945 - DNA, 20 bp, synthetic construct
  misc_feature 1..20: note = Description of Artificial Sequence: Synthetic oligonucleotide
  source 1..20: mol_type = other DNA
actgtagaaagggatgaagc

SEQ ID NO: 946 - DNA, 20 bp, synthetic construct
  misc_feature 1..20: note = Description of Artificial Sequence: Synthetic oligonucleotide
  source 1..20: mol_type = other DNA
cactgtagaaagggatgaag

SEQ ID NO: 947 - DNA, 20 bp, synthetic construct
  misc_feature 1..20: note = Description of Artificial Sequence: Synthetic oligonucleotide
  source 1..20: mol_type = other DNA
ccactgtagaaagggatgaa

SEQ ID NO: 948 - DNA, 20 bp, synthetic construct
  misc_feature 1..20: note = Description of Artificial Sequence: Synthetic oligonucleotide
  source 1..20: mol_type = other DNA
tgtagaaagggatgaagcag

SEQ ID NO: 949 - DNA, 20 bp, synthetic construct
  misc_feature 1..20: note = Description of Artificial Sequence: Synthetic oligonucleotide
  source 1..20: mol_type = other DNA
ctgtagaaagggatgaagca

SEQ ID NO: 950 - DNA, 20 bp, synthetic construct
  misc_feature 1..20: note = Description of Artificial Sequence: Synthetic oligonucleotide
  source 1..20: mol_type = other DNA
actgtagaaagggatgaagc

SEQ ID NO: 951 - DNA, 20 bp, synthetic construct
  misc_feature 1..20: note = Description of Artificial Sequence: Synthetic oligonucleotide
  source 1..20: mol_type = other DNA
cactgtagaaagggatgaag

SEQ ID NO: 952 - DNA, 20 bp, synthetic construct
  misc_feature 1..20: note = Description of Artificial Sequence: Synthetic oligonucleotide
  source 1..20: mol_type = other DNA
ccactgtagaaagggatgaa

SEQ ID NO: 953 - DNA, 20 bp, synthetic construct
  misc_feature 1..20: note = Synthetic oligonucleotide
  modified_base 1: mod_base = OTHER; note = uracil
  source 1..20: mol_type = other DNA
tgtagaaagggatgaagcag

SEQ ID NO: 954 - DNA, 20 bp, synthetic construct
  misc_feature 1..20: note = Description of Artificial Sequence: Synthetic oligonucleotide
  source 1..20: mol_type = other DNA
ctgtagaaagggatgaagca

SEQ ID NO: 955 - DNA, 20 bp, synthetic construct
  misc_feature 1..20: note = Synthetic oligonucleotide
  modified_base 5: mod_base = OTHER; note = uracil
  source 1..20: mol_type = other DNA
actgtagaaagggatgaagc

SEQ ID NO: 956 - DNA, 20 bp, synthetic construct
  misc_feature 1..20: note = Synthetic oligonucleotide
  modified_base 16: mod_base = OTHER; note = uracil
  source 1..20: mol_type = other DNA
cactgtagaaagggatgaag

SEQ ID NO: 957 - DNA, 20 bp, synthetic construct
  misc_feature 1..20: note = Synthetic oligonucleotide
  modified_base 5: mod_base = OTHER; note = uracil
  modified_base 17: mod_base = OTHER; note = uracil
  source 1..20: mol_type = other DNA
ccactgtagaaagggatgaa

SEQ ID NO: 958 - DNA, 23 bp, synthetic construct
  misc_feature 1..23: note = Synthetic oligonucleotide
  modified_base 7: mod_base = OTHER; note = uracil
  modified_base 9: mod_base = OTHER; note = uracil
  modified_base 19: mod_base = OTHER; note = uracil
  modified_base 23: mod_base = OTHER; note = uracil
  source 1..23: mol_type = other DNA
tgccactgtagaaaggcatgatt

SEQ ID NO: 959 - DNA, 23 bp, synthetic construct
  misc_feature 1..23: note = Synthetic oligonucleotide
  modified_base 7: mod_base = OTHER; note = uracil
  modified_base 9: mod_base = OTHER; note = uracil
  modified_base 19: mod_base = OTHER; note = uracil
  modified_base 23: mod_base = OTHER; note = uracil
  source 1..23: mol_type = other DNA
tgccactgtagaaaggcatgatt

SEQ ID NO: 960 - DNA, 23 bp, synthetic construct
  misc_feature 1..23: note = Synthetic oligonucleotide
  modified_base 7: mod_base = OTHER; note = uracil
  modified_base 9: mod_base = OTHER; note = uracil
  modified_base 19: mod_base = OTHER; note = uracil
  modified_base 23: mod_base = OTHER; note = uracil
  source 1..23: mol_type = other DNA
tgccactgtagaaaggcatgatt

SEQ ID NO: 961 - DNA, 23 bp, synthetic construct
  misc_feature 1..23: note = Synthetic oligonucleotide
  modified_base 7: mod_base = OTHER; note = uracil
  modified_base 9: mod_base = OTHER; note = uracil
  modified_base 19: mod_base = OTHER; note = uracil
  modified_base 23: mod_base = OTHER; note = uracil
  source 1..23: mol_type = other DNA
tgccactgtagaaaggcatgatt

SEQ ID NO: 962 - DNA, 23 bp, synthetic construct
  misc_feature 1..23: note = Synthetic oligonucleotide
  modified_base 7: mod_base = OTHER; note = uracil
  modified_base 9: mod_base = OTHER; note = uracil
  modified_base 19: mod_base = OTHER; note = uracil
  modified_base 23: mod_base = OTHER; note = uracil
  source 1..23: mol_type = other DNA
tgccactgtagaaaggcatgatt

SEQ ID NO: 963 - DNA, 23 bp, synthetic construct
  misc_feature 1..23: note = Synthetic oligonucleotide
  modified_base 7: mod_base = OTHER; note = uracil
  modified_base 9: mod_base = OTHER; note = uracil
  modified_base 19: mod_base = OTHER; note = uracil
  modified_base 23: mod_base = OTHER; note = uracil
  source 1..23: mol_type = other DNA
tgccactgtagaaaggcatgatt

SEQ ID NO: 964 - DNA, 23 bp, synthetic construct
  misc_feature 1..23: note = Synthetic oligonucleotide
  modified_base 7: mod_base = OTHER; note = uracil
  modified_base 9: mod_base = OTHER; note = uracil
  modified_base 19: mod_base = OTHER; note = uracil
  modified_base 23: mod_base = OTHER; note = uracil
  source 1..23: mol_type = other DNA
tgccactgtagaaaggcatgatt

SEQ ID NO: 965 - DNA, 23 bp, synthetic construct
  misc_feature 1..23: note = Synthetic oligonucleotide
  modified_base 7: mod_base = OTHER; note = uracil
  modified_base 9: mod_base = OTHER; note = uracil
  modified_base 19: mod_base = OTHER; note = uracil
  modified_base 23: mod_base = OTHER; note = uracil
  source 1..23: mol_type = other DNA
tgccactgtagaaaggcatgatt

SEQ ID NO: 966 - DNA, 23 bp, synthetic construct
  misc_feature 1..23: note = Synthetic oligonucleotide
  modified_base 7: mod_base = OTHER; note = uracil
  modified_base 9: mod_base = OTHER; note = uracil
  modified_base 19: mod_base = OTHER; note = uracil
  modified_base 23: mod_base = OTHER; note = uracil
  source 1..23: mol_type = other DNA
tgccactgtagaaaggcatgatt

SEQ ID NO: 967 - DNA, 23 bp, synthetic construct
  misc_feature 1..23: note = Synthetic oligonucleotide
  modified_base 7: mod_base = OTHER; note = uracil
  modified_base 9: mod_base = OTHER; note = uracil
  modified_base 19: mod_base = OTHER; note = uracil
  modified_base 23: mod_base = OTHER; note = uracil
  source 1..23: mol_type = other DNA
tgccactgtagaaaggcatgatt

SEQ ID NO: 968 - DNA, 23 bp, synthetic construct
  misc_feature 1..23: note = Synthetic oligonucleotide
  modified_base 7: mod_base = OTHER; note = uracil
  modified_base 9: mod_base = OTHER; note = uracil
  modified_base 19: mod_base = OTHER; note = uracil
  modified_base 23: mod_base = OTHER; note = uracil
  source 1..23: mol_type = other DNA
tgccactgtagaaaggcatgatt

SEQ ID NO: 969 - DNA, 23 bp, synthetic construct
  misc_feature 1..23: note = Synthetic oligonucleotide
  modified_base 7: mod_base = OTHER; note = uracil
  modified_base 9: mod_base = OTHER; note = uracil
  modified_base 19: mod_base = OTHER; note = uracil
  modified_base 23: mod_base = OTHER; note = uracil
  source 1..23: mol_type = other DNA
tgccactgtagaaaggcatgatt

SEQ ID NO: 970 - DNA, 23 bp, synthetic construct
  misc_feature 1..23: note = Synthetic oligonucleotide
  modified_base 7: mod_base = OTHER; note = uracil
  modified_base 9: mod_base = OTHER; note = uracil
  modified_base 19: mod_base = OTHER; note = uracil
  modified_base 23: mod_base = OTHER; note = uracil
  source 1..23: mol_type = other DNA
tgccactgtagaaaggcatgatt

SEQ ID NO: 971 - DNA, 23 bp, synthetic construct
  misc_feature 1..23: note = Synthetic oligonucleotide
  modified_base 7: mod_base = OTHER; note = uracil
  modified_base 9: mod_base = OTHER; note = uracil
  modified_base 19: mod_base = OTHER; note = uracil
  modified_base 23: mod_base = OTHER; note = uracil
  source 1..23: mol_type = other DNA
tgccactgtagaaaggcatgatt

SEQ ID NO: 972 - DNA, 23 bp, synthetic construct
  misc_feature 1..23: note = Synthetic oligonucleotide
  modified_base 7: mod_base = OTHER; note = uracil
  modified_base 9: mod_base = OTHER; note = uracil
  modified_base 19: mod_base = OTHER; note = uracil
  modified_base 23: mod_base = OTHER; note = uracil
  source 1..23: mol_type = other DNA
tgccactgtagaaaggcatgatt

SEQ ID NO: 973 - DNA, 20 bp, synthetic construct
  misc_feature 1..20: note = Description of Artificial Sequence: Synthetic oligonucleotide
  source 1..20: mol_type = other DNA
ctgtagaaaggcatgaagca

SEQ ID NO: 974 - DNA, 20 bp, synthetic construct
  misc_feature 1..20: note = Description of Artificial Sequence: Synthetic oligonucleotide
  source 1..20: mol_type = other DNA
ctgtagaaaggcatgaagca

SEQ ID NO: 975 - DNA, 20 bp, synthetic construct
  misc_feature 1..20: note = Description of Artificial Sequence: Synthetic oligonucleotide
  source 1..20: mol_type = other DNA
ctgtagaaaggcatgaagca

SEQ ID NO: 976 - DNA, 20 bp, synthetic construct
  misc_feature 1..20: note = Description of Artificial Sequence: Synthetic oligonucleotide
  source 1..20: mol_type = other DNA
ctgtagaaaggcatgaagca

SEQ ID NO: 977 - DNA, 20 bp, synthetic construct
  misc_feature 1..20: note = Description of Artificial Sequence: Synthetic oligonucleotide
  source 1..20: mol_type = other DNA
ctgtagaaaggcatgaagca

SEQ ID NO: 978 - DNA, 20 bp, synthetic construct
  misc_feature 1..20: note = Description of Artificial Sequence: Synthetic oligonucleotide
  source 1..20: mol_type = other DNA
ctgtagaaaggcatgaagca

SEQ ID NO: 979 - DNA, 20 bp, synthetic construct
  misc_feature 1..20: note = Description of Artificial Sequence: Synthetic oligonucleotide
  source 1..20: mol_type = other DNA
ctgtagaaaggcatgaagca

SEQ ID NO: 980 - DNA, 23 bp, synthetic construct
  misc_feature 1..23: note = Synthetic oligonucleotide
  modified_base 7: mod_base = OTHER; note = uracil
  modified_base 9: mod_base = OTHER; note = uracil
  modified_base 19: mod_base = OTHER; note = uracil
  modified_base 23: mod_base = OTHER; note = uracil
  source 1..23: mol_type = other DNA
tgccactgtagaaaggcatgatt

SEQ ID NO: 981 - DNA, 23 bp, synthetic construct
  misc_feature 1..23: note = Synthetic oligonucleotide
  modified_base 7: mod_base = OTHER; note = uracil
  modified_base 9: mod_base = OTHER; note = uracil
  modified_base 19: mod_base = OTHER; note = uracil
  modified_base 23: mod_base = OTHER; note = uracil
  source 1..23: mol_type = other DNA
tgccactgtagaaaggcatgatt

SEQ ID NO: 982 - DNA, 20 bp, synthetic construct
  misc_feature 1..20: note = Description of Artificial Sequence: Synthetic oligonucleotide
  source 1..20: mol_type = other DNA
ctgtagaaaggcatgaagca

SEQ ID NO: 983 - DNA, 20 bp, synthetic construct
  misc_feature 1..20: note = Description of Artificial Sequence: Synthetic oligonucleotide
  source 1..20: mol_type = other DNA
ctgtagaaaggcatgaagca

SEQ ID NO: 984 - DNA, 20 bp, synthetic construct
  misc_feature 1..20: note = Description of Artificial Sequence: Synthetic oligonucleotide
  source 1..20: mol_type = other DNA
ctgtagaaaggcatgaagca

SEQ ID NO: 985 - DNA, 23 bp, synthetic construct
  misc_feature 1..23: note = Synthetic oligonucleotide
  modified_base 7: mod_base = OTHER; note = uracil
  modified_base 9: mod_base = OTHER; note = uracil
  modified_base 19: mod_base = OTHER; note = uracil
  modified_base 23: mod_base = OTHER; note = uracil
  source 1..23: mol_type = other DNA
tgccactgtagaaaggcatgatt

SEQ ID NO: 986 - DNA, 23 bp, synthetic construct
  misc_feature 1..23: note = Synthetic oligonucleotide
  modified_base 7: mod_base = OTHER; note = uracil
  modified_base 9: mod_base = OTHER; note = uracil
  modified_base 19: mod_base = OTHER; note = uracil
  modified_base 23: mod_base = OTHER; note = uracil
  source 1..23: mol_type = other DNA
tgccactgtagaaaggcatgatt

SEQ ID NO: 987 - DNA, 20 bp, synthetic construct
  misc_feature 1..20: note = Description of Artificial Sequence: Synthetic oligonucleotide
  source 1..20: mol_type = other DNA
ctgtagaaaggcatgaagca

SEQ ID NO: 988 - DNA, 20 bp, synthetic construct
  misc_feature 1..20: note = Description of Artificial Sequence: Synthetic oligonucleotide
  source 1..20: mol_type = other DNA
ctgtagaaaggcatgaagca

SEQ ID NO: 989 - DNA, 20 bp, synthetic construct
  misc_feature 1..20: note = Description of Artificial Sequence: Synthetic oligonucleotide
  source 1..20: mol_type = other DNA
ctgtagaaaggcatgaagca

SEQ ID NO: 990 - DNA, 20 bp, synthetic construct
  misc_feature 1..20: note = Description of Artificial Sequence: Synthetic oligonucleotide
  source 1..20: mol_type = other DNA
ctgtagaaaggcatgaagca

SEQ ID NO: 991 - DNA, 20 bp, synthetic construct
  misc_feature 1..20: note = Description of Artificial Sequence: Synthetic oligonucleotide
  source 1..20: mol_type = other DNA
ctgtagaaaggcatgaagca

SEQ ID NO: 992 - DNA, 20 bp, synthetic construct
  misc_feature 1..20: note = Description of Artificial Sequence: Synthetic oligonucleotide
  source 1..20: mol_type = other DNA
ctgtagaaaggcatgaagca

SEQ ID NO: 993 - DNA, 20 bp, synthetic construct
  misc_feature 1..20: note = Description of Artificial Sequence: Synthetic oligonucleotide
  source 1..20: mol_type = other DNA
ctgtagaaaggcatgaagca

SEQ ID NO: 994 - DNA, 20 bp, synthetic construct
  misc_feature 1..20: note = Description of Artificial Sequence: Synthetic oligonucleotide
  source 1..20: mol_type = other DNA
ctgtagaaaggcatgaagca

SEQ ID NO: 995 - DNA, 20 bp, synthetic construct
  misc_feature 1..20: note = Description of Artificial Sequence: Synthetic oligonucleotide
  source 1..20: mol_type = other DNA
ctgtagaaaggcatgaagca

SEQ ID NO: 996 - DNA, 20 bp, synthetic construct
  misc_feature 1..20: note = Description of Artificial Sequence: Synthetic oligonucleotide
  source 1..20: mol_type = other DNA
ctgtagaaaggcatgaagca

SEQ ID NO: 997 - DNA, 20 bp, synthetic construct
  misc_feature 1..20: note = Description of Artificial Sequence: Synthetic oligonucleotide
  source 1..20: mol_type = other DNA
ctgtagaaaggcatgaagca

SEQ ID NO: 998 - DNA, 20 bp, synthetic construct
  misc_feature 1..20: note = Description of Artificial Sequence: Synthetic oligonucleotide
  source 1..20: mol_type = other DNA
ctgtagaaaggcatgaagca

SEQ ID NO: 999 - DNA, 20 bp, synthetic construct
  misc_feature 1..20: note = Description of Artificial Sequence: Synthetic oligonucleotide
  source 1..20: mol_type = other DNA
ctgtagaaaggcatgaagca

SEQ ID NO: 1000 - DNA, 20 bp, synthetic construct
  misc_feature 1..20: note = Description of Artificial Sequence: Synthetic oligonucleotide
  source 1..20: mol_type = other DNA
ctgtagaaaggcatgaagca

SEQ ID NO: 1001 - DNA, 20 bp, synthetic construct
  misc_feature 1..20: note = Description of Artificial Sequence: Synthetic oligonucleotide
  source 1..20: mol_type = other DNA
ctgtagaaaggcatgaagca

SEQ ID NO: 1002 - DNA, 20 bp, synthetic construct
  misc_feature 1..20: note = Description of Artificial Sequence: Synthetic oligonucleotide
  source 1..20: mol_type = other DNA
ctgtagaaaggcatgaagca

SEQ ID NO: 1003 - DNA, 23 bp, synthetic construct
  misc_feature 1..23: note = Synthetic oligonucleotide
  modified_base 4..5: mod_base = OTHER; note = uracil
  modified_base 9: mod_base = OTHER; note = uracil
  modified_base 15..16: mod_base = OTHER; note = uracil
  modified_base 19: mod_base = OTHER; note = uracil
  modified_base 23: mod_base = OTHER; note = uracil
  source 1..23: mol_type = other DNA
tccttccctgaaggttcctcctt

SEQ ID NO: 1004 - DNA, 23 bp, synthetic construct
  misc_feature 1..23: note = Synthetic oligonucleotide
  modified_base 4..5: mod_base = OTHER; note = uracil
  modified_base 9: mod_base = OTHER; note = uracil
  modified_base 15..16: mod_base = OTHER; note = uracil
  modified_base 19: mod_base = OTHER; note = uracil
  modified_base 23: mod_base = OTHER; note = uracil
  source 1..23: mol_type = other DNA
tccttccctgaaggttcctcctt

SEQ ID NO: 1005 - DNA, 23 bp, synthetic construct
  misc_feature 1..23: note = Synthetic oligonucleotide
  modified_base 4..5: mod_base = OTHER; note = uracil
  modified_base 9: mod_base = OTHER; note = uracil
  modified_base 15..16: mod_base = OTHER; note = uracil
  modified_base 19: mod_base = OTHER; note = uracil
  modified_base 23: mod_base = OTHER; note = uracil
  source 1..23: mol_type = other DNA
tccttccctgaaggttcctcctt

SEQ ID NO: 1006 - DNA, 23 bp, synthetic construct
  misc_feature 1..23: note = Synthetic oligonucleotide
  modified_base 4..5: mod_base = OTHER; note = uracil
  modified_base 9: mod_base = OTHER; note = uracil
  modified_base 15..16: mod_base = OTHER; note = uracil
  modified_base 19: mod_base = OTHER; note = uracil
  modified_base 23: mod_base = OTHER; note = uracil
  source 1..23: mol_type = other DNA
tccttccctgaaggttcctcctt

SEQ ID NO: 1007 - DNA, 23 bp, synthetic construct
  misc_feature 1..23: note = Synthetic oligonucleotide
  modified_base 4..5: mod_base = OTHER; note = uracil
  modified_base 9: mod_base = OTHER; note = uracil
  modified_base 15..16: mod_base = OTHER; note = uracil
  modified_base 19: mod_base = OTHER; note = uracil
  modified_base 23: mod_base = OTHER; note = uracil
  source 1..23: mol_type = other DNA
tccttccctgaaggttcctcctt

SEQ ID NO: 1008 - DNA, 23 bp, synthetic construct
  misc_feature 1..23: note = Synthetic oligonucleotide
  modified_base 4..5: mod_base = OTHER; note = uracil
  modified_base 9: mod_base = OTHER; note = uracil
  modified_base 15..16: mod_base = OTHER; note = uracil
  modified_base 19: mod_base = OTHER; note = uracil
  modified_base 23: mod_base = OTHER; note = uracil
  source 1..23: mol_type = other DNA
tccttccctgaaggttcctcctt

SEQ ID NO: 1009 - DNA, 23 bp, synthetic construct
  misc_feature 1..23: note = Synthetic oligonucleotide
  modified_base 4..5: mod_base = OTHER; note = uracil
  modified_base 9: mod_base = OTHER; note = uracil
  modified_base 15..16: mod_base = OTHER; note = uracil
  modified_base 19: mod_base = OTHER; note = uracil
  modified_base 23: mod_base = OTHER; note = uracil
  source 1..23: mol_type = other DNA
tccttccctgaaggttcctcctt

SEQ ID NO: 1010 - DNA, 23 bp, synthetic construct
  misc_feature 1..23: note = Synthetic oligonucleotide
  modified_base 4..5: mod_base = OTHER; note = uracil
  modified_base 9: mod_base = OTHER; note = uracil
  modified_base 15..16: mod_base = OTHER; note = uracil
  modified_base 19: mod_base = OTHER; note = uracil
  modified_base 23: mod_base = OTHER; note = uracil
  source 1..23: mol_type = other DNA
tccttccctgaaggttcctcctt

SEQ ID NO: 1011 - DNA, 23 bp, synthetic construct
  misc_feature 1..23: note = Synthetic oligonucleotide
  modified_base 7: mod_base = OTHER; note = uracil
  modified_base 9: mod_base = OTHER; note = uracil
  modified_base 19: mod_base = OTHER; note = uracil
  modified_base 23: mod_base = OTHER; note = uracil
  source 1..23: mol_type = other DNA
tgccactgtagaaaggcatgatt

SEQ ID NO: 1012 - DNA, 23 bp, synthetic construct
  misc_feature 1..23: note = Synthetic oligonucleotide
  modified_base 7: mod_base = OTHER; note = uracil
  modified_base 9: mod_base = OTHER; note = uracil
  modified_base 19: mod_base = OTHER; note = uracil
  modified_base 23: mod_base = OTHER; note = uracil
  source 1..23: mol_type = other DNA
tgccactgtagaaaggcatgatt

SEQ ID NO: 1013 - DNA, 23 bp, synthetic construct
  misc_feature 1..23: note = Synthetic oligonucleotide
  modified_base 7: mod_base = OTHER; note = uracil
  modified_base 9: mod_base = OTHER; note = uracil
  modified_base 19: mod_base = OTHER; note = uracil
  modified_base 23: mod_base = OTHER; note = uracil
  source 1..23: mol_type = other DNA
tgccactgtagaaaggcatgatt

SEQ ID NO: 1014 - DNA, 23 bp, synthetic construct
  misc_feature 1..23: note = Synthetic oligonucleotide
  modified_base 7: mod_base = OTHER; note = uracil
  modified_base 9: mod_base = OTHER; note = uracil
  modified_base 19: mod_base = OTHER; note = uracil
  modified_base 23: mod_base = OTHER; note = uracil
  source 1..23: mol_type = other DNA
tgccactgtagaaaggcatgatt

SEQ ID NO: 1015 - DNA, 20 bp, synthetic construct
  misc_feature 1..20: note = Description of Artificial Sequence: Synthetic oligonucleotide
  source 1..20: mol_type = other DNA
ctgtagaaaggcatgaagca

SEQ ID NO: 1016 - DNA, 20 bp, synthetic construct
  misc_feature 1..20: note = Description of Artificial Sequence: Synthetic oligonucleotide
  source 1..20: mol_type = other DNA
ctgtagaaaggcatgaagca

SEQ ID NO: 1017 - DNA, 20 bp, synthetic construct
  misc_feature 1..20: note = Description of Artificial Sequence: Synthetic oligonucleotide
  source 1..20: mol_type = other DNA
ctgtagaaaggcatgaagca

SEQ ID NO: 1018 - DNA, 20 bp, synthetic construct
  misc_feature 1..20: note = Description of Artificial Sequence: Synthetic oligonucleotide
  source 1..20: mol_type = other DNA
ctgtagaaaggcatgaagca

SEQ ID NO: 1019 - DNA, 20 bp, synthetic construct
  misc_feature 1..20: note = Description of Artificial Sequence: Synthetic oligonucleotide
  source 1..20: mol_type = other DNA
ctgtagaaaggcatgaagca

SEQ ID NO: 1020 - DNA, 20 bp, synthetic construct
  misc_feature 1..20: note = Description of Artificial Sequence: Synthetic oligonucleotide
  source 1..20: mol_type = other DNA
ctgtagaaaggcatgaagca

SEQ ID NO: 1021 - DNA, 23 bp, synthetic construct
  misc_feature 1..23: note = Synthetic oligonucleotide
  modified_base 7: mod_base = OTHER; note = uracil
  modified_base 9: mod_base = OTHER; note = uracil
  modified_base 19: mod_base = OTHER; note = uracil
  modified_base 23: mod_base = OTHER; note = uracil
  source 1..23: mol_type = other DNA
tgccactgtagaaaggcatgatt

SEQ ID NO: 1022 - DNA, 23 bp, synthetic construct
  misc_feature 1..23: note = Synthetic oligonucleotide
  modified_base 7: mod_base = OTHER; note = uracil
  modified_base 9: mod_base = OTHER; note = uracil
  modified_base 19: mod_base = OTHER; note = uracil
  modified_base 23: mod_base = OTHER; note = uracil
  source 1..23: mol_type = other DNA
tgccactgtagaaaggcatgatt

SEQ ID NO: 1023 - DNA, 23 bp, synthetic construct
  misc_feature 1..23: note = Synthetic oligonucleotide
  modified_base 7: mod_base = OTHER; note = uracil
  modified_base 9: mod_base = OTHER; note = uracil
  modified_base 19: mod_base = OTHER; note = uracil
  modified_base 23: mod_base = OTHER; note = uracil
  source 1..23: mol_type = other DNA
tgccactgtagaaaggcatgatt

SEQ ID NO: 1024 - DNA, 23 bp, synthetic construct
  misc_feature 1..23: note = Synthetic oligonucleotide
  modified_base 7: mod_base = OTHER; note = uracil
  modified_base 9: mod_base = OTHER; note = uracil
  modified_base 19: mod_base = OTHER; note = uracil
  modified_base 23: mod_base = OTHER; note = uracil
  source 1..23: mol_type = other DNA
tgccactgtagaaaggcatgatt

SEQ ID NO: 1025 - DNA, 24 bp, synthetic construct
  misc_feature 1..24: note = Description of Artificial Sequence: Synthetic oligonucleotide
  source 1..24: mol_type = other DNA
cactgtagaaaggcatgaagcagg

SEQ ID NO: 1026 - DNA, 24 bp, synthetic construct
  misc_feature 1..24: note = Description of Artificial Sequence: Synthetic oligonucleotide
  source 1..24: mol_type = other DNA
cactgtagaaaggcatgaagcagg

SEQ ID NO: 1027 - DNA, 24 bp, synthetic construct
  misc_feature 1..24: note = Description of Artificial Sequence: Synthetic oligonucleotide
  source 1..24: mol_type = other DNA
cactgtagaaaggcatgaagcagg

SEQ ID NO: 1028 - DNA, 24 bp, synthetic construct
  misc_feature 1..24: note = Description of Artificial Sequence: Synthetic oligonucleotide
  source 1..24: mol_type = other DNA
cactgtagaaaggcatgaagcagg

SEQ ID NO: 1029 - DNA, 24 bp, synthetic construct
  misc_feature 1..24: note = Description of Artificial Sequence: Synthetic oligonucleotide
  source 1..24: mol_type = other DNA
cactgtagaaaggcatgaagcagg

SEQ ID NO: 1030 - DNA, 24 bp, synthetic construct
  misc_feature 1..24: note = Description of Artificial Sequence: Synthetic oligonucleotide
  source 1..24: mol_type = other DNA
cactgtagaaaggcatgaagcagg

SEQ ID NO: 1031 - DNA, 24 bp, synthetic construct
  misc_feature 1..24: note = Description of Artificial Sequence: Synthetic oligonucleotide
  source 1..24: mol_type = other DNA
cactgtagaaaggcatgaagcagg

SEQ ID NO: 1032 - DNA, 24 bp, synthetic construct
  misc_feature 1..24: note = Description of Artificial Sequence: Synthetic oligonucleotide
  source 1..24: mol_type = other DNA
cactgtagaaaggcatgaagcagg

SEQ ID NO: 1033 - DNA, 24 bp, synthetic construct
  misc_feature 1..24: note = Description of Artificial Sequence: Synthetic oligonucleotide
  source 1..24: mol_type = other DNA
cactgtagaaaggcatgaagcagg

SEQ ID NO: 1034 - DNA, 24 bp, synthetic construct
  misc_feature 1..24: note = Description of Artificial Sequence: Synthetic oligonucleotide
  source 1..24: mol_type = other DNA
cactgtagaaaggcatgaagcagg

SEQ ID NO: 1035 - DNA, 24 bp, synthetic construct
  misc_feature 1..24: note = Description of Artificial Sequence: Synthetic oligonucleotide
  source 1..24: mol_type = other DNA
cactgtagaaaggcatgaagcagg

SEQ ID NO: 1036 - DNA, 24 bp, synthetic construct
  misc_feature 1..24: note = Description of Artificial Sequence: Synthetic oligonucleotide
  source 1..24: mol_type = other DNA
cactgtagaaaggcatgaagcagg

SEQ ID NO: 1037 - DNA, 23 bp, synthetic construct
  misc_feature 1..23: note = Synthetic oligonucleotide
  modified_base 7: mod_base = OTHER; note = uracil
  modified_base 9: mod_base = OTHER; note = uracil
  modified_base 19: mod_base = OTHER; note = uracil
  modified_base 22..23: mod_base = OTHER; note = uracil
  source 1..23: mol_type = other DNA
tgccactgtagaaaggcatgatt

SEQ ID NO: 1038 - DNA, 23 bp, synthetic construct
  misc_feature 1..23: note = Synthetic oligonucleotide
  modified_base 7: mod_base = OTHER; note = uracil
  modified_base 9: mod_base = OTHER; note = uracil
  modified_base 19: mod_base = OTHER; note = uracil
  modified_base 22..23: mod_base = OTHER; note = uracil
  source 1..23: mol_type = other DNA
tgccactgtagaaaggcatgatt

SEQ ID NO: 1039 - DNA, 23 bp, synthetic construct
  misc_feature 1..23: note = Synthetic oligonucleotide
  modified_base 7: mod_base = OTHER; note = uracil
  modified_base 9: mod_base = OTHER; note = uracil
  modified_base 19: mod_base = OTHER; note = uracil
  modified_base 22..23: mod_base = OTHER; note = uracil
  source 1..23: mol_type = other DNA
tgccactgtagaaaggcatgatt

SEQ ID NO: 1040 - DNA, 23 bp, synthetic construct
  misc_feature 1..23: note = Synthetic oligonucleotide
  modified_base 7: mod_base = OTHER; note = uracil
  modified_base 9: mod_base = OTHER; note = uracil
  modified_base 19: mod_base = OTHER; note = uracil
  modified_base 22..23: mod_base = OTHER; note = uracil
  source 1..23: mol_type = other DNA
tgccactgtagaaaggcatgatt

SEQ ID NO: 1041 - DNA, 23 bp, synthetic construct
  misc_feature 1..23: note = Synthetic oligonucleotide
  modified_base 7: mod_base = OTHER; note = uracil
  modified_base 9: mod_base = OTHER; note = uracil
  modified_base 19: mod_base = OTHER; note = uracil
  modified_base 22..23: mod_base = OTHER; note = uracil
  source 1..23: mol_type = other DNA
tgccactgtagaaaggcatgatt

SEQ ID NO: 1042 - DNA, 23 bp, synthetic construct
  misc_feature 1..23: note = Synthetic oligonucleotide
  modified_base 7: mod_base = OTHER; note = uracil
  modified_base 9: mod_base = OTHER; note = uracil
  modified_base 19: mod_base = OTHER; note = uracil
  modified_base 22..23: mod_base = OTHER; note = uracil
  source 1..23: mol_type = other DNA
tgccactgtagaaaggcatgatt

SEQ ID NO: 1043 - DNA, 23 bp, synthetic construct
  misc_feature 1..23: note = Synthetic oligonucleotide
  modified_base 7: mod_base = OTHER; note = uracil
  modified_base 9: mod_base = OTHER; note = uracil
  modified_base 19: mod_base = OTHER; note = uracil
  modified_base 22..23: mod_base = OTHER; note = uracil
  source 1..23: mol_type = other DNA
tgccactgtagaaaggcatgatt

SEQ ID NO: 1044 - DNA, 23 bp, synthetic construct
  misc_feature 1..23: note = Synthetic oligonucleotide
  modified_base 7: mod_base = OTHER; note = uracil
  modified_base 9: mod_base = OTHER; note = uracil
  modified_base 19: mod_base = OTHER; note = uracil
  modified_base 22..23: mod_base = OTHER; note = uracil
  source 1..23: mol_type = other DNA
tgccactgtagaaaggcatgatt

SEQ ID NO: 1045 - DNA, 23 bp, synthetic construct
  misc_feature 1..23: note = Synthetic oligonucleotide
  modified_base 7: mod_base = OTHER; note = uracil
  modified_base 9: mod_base = OTHER; note = uracil
  modified_base 19: mod_base = OTHER; note = uracil
  modified_base 23: mod_base = OTHER; note = uracil
  source 1..23: mol_type = other DNA
tgccactgtagaaaggcatgatt

SEQ ID NO: 1046 - DNA, 23 bp, synthetic construct
  misc_feature 1..23: note = Synthetic oligonucleotide
  modified_base 7: mod_base = OTHER; note = uracil
  modified_base 9: mod_base = OTHER; note = uracil
  modified_base 19: mod_base = OTHER; note = uracil
  modified_base 23: mod_base = OTHER; note = uracil
  source 1..23: mol_type = other DNA
tgccactgtagaaaggcatgatt

SEQ ID NO: 1047 - DNA, 23 bp, synthetic construct
  misc_feature 1..23: note = Synthetic oligonucleotide
  modified_base 7: mod_base = OTHER; note = uracil
  modified_base 9: mod_base = OTHER; note = uracil
  modified_base 19: mod_base = OTHER; note = uracil
  modified_base 23: mod_base = OTHER; note = uracil
  source 1..23: mol_type = other DNA
tgccactgtagaaaggcatgatt

SEQ ID NO: 1048 - DNA, 23 bp, synthetic construct
  misc_feature 1..23: note = Synthetic oligonucleotide
  modified_base 7: mod_base = OTHER; note = uracil
  modified_base 9: mod_base = OTHER; note = uracil
  modified_base 19: mod_base = OTHER; note = uracil
  modified_base 23: mod_base = OTHER; note = uracil
  source 1..23: mol_type = other DNA
tgccactgtagaaaggcatgatt

SEQ ID NO: 1049 - RNA, 24 nt, synthetic construct
  misc_feature 1..24: note = Description of Artificial Sequence: Synthetic oligonucleotide
  source 1..24: mol_type = other RNA
cctgcttcatgcctttctacagtg

SEQ ID NO: 1050 - RNA, 24 nt, synthetic construct
  misc_feature 1..24: note = Description of Artificial Sequence: Synthetic oligonucleotide
  source 1..24: mol_type = other RNA
cctgcttcatccccttctacagtg

SEQ ID NO: 1051 - DNA, 23 bp, synthetic construct
  misc_feature 1..23: note = Synthetic oligonucleotide
  modified_base 7: mod_base = OTHER; note = uracil
  modified_base 9: mod_base = OTHER; note = uracil
  modified_base 19: mod_base = OTHER; note = uracil
  modified_base 23: mod_base = OTHER; note = uracil
  source 1..23: mol_type = other DNA
tgccactgtagaaaggcatgatt

SEQ ID NO: 1052 - DNA, 23 bp, synthetic construct
  misc_feature 1..23: note = Synthetic oligonucleotide
  modified_base 7: mod_base = OTHER; note = uracil
  modified_base 9: mod_base = OTHER; note = uracil
  modified_base 19: mod_base = OTHER; note = uracil
  modified_base 23: mod_base = OTHER; note = uracil
  source 1..23: mol_type = other DNA
tgccactgtagaaaggcatgatt

SEQ ID NO: 1053 - RNA, 24 nt, synthetic construct
  misc_feature 1..24: note = Description of Artificial Sequence: Synthetic oligonucleotide
  source 1..24: mol_type = other RNA
cttcatgcctttctacagtggcct

SEQ ID NO: 1054 - RNA, 24 nt, synthetic construct
  misc_feature 1..24: note = Description of Artificial Sequence: Synthetic oligonucleotide
  source 1..24: mol_type = other RNA
cttcatccccttctacagtggcct

SEQ ID NO: 1055 - DNA, 22 bp, synthetic construct
  misc_feature 1..22: note = Synthetic oligonucleotide
  modified_base 6: mod_base = OTHER; note = uracil
  modified_base 8: mod_base = OTHER; note = uracil
  modified_base 18: mod_base = OTHER; note = uracil
  modified_base 22: mod_base = OTHER; note = uracil
  source 1..22: mol_type = other DNA
gccactgtagaaaggcatgatt

SEQ ID NO: 1056 - DNA, 22 bp, synthetic construct
  misc_feature 1..22: note = Synthetic oligonucleotide
  modified_base 6: mod_base = OTHER; note = uracil
  modified_base 8: mod_base = OTHER; note = uracil
  modified_base 18: mod_base = OTHER; note = uracil
  modified_base 22: mod_base = OTHER; note = uracil
  source 1..22: mol_type = other DNA
tccactgtagaaaggcatgatt

SEQ ID NO: 1057 - DNA, 22 bp, synthetic construct
  misc_feature 1..22: note = Synthetic oligonucleotide
  modified_base 6: mod_base = OTHER; note = uracil
  modified_base 8: mod_base = OTHER; note = uracil
  modified_base 18: mod_base = OTHER; note = uracil
  modified_base 22: mod_base = OTHER; note = uracil
  source 1..22: mol_type = other DNA
tgcactgtagaaaggcatgatt

SEQ ID NO: 1058 - DNA, 22 bp, synthetic construct
  misc_feature 1..22: note = Synthetic oligonucleotide
  modified_base 6: mod_base = OTHER; note = uracil
  modified_base 8: mod_base = OTHER; note = uracil
  modified_base 18: mod_base = OTHER; note = uracil
  modified_base 22: mod_base = OTHER; note = uracil
  source 1..22: mol_type = other DNA
tgcactgtagaaaggcatgatt

SEQ ID NO: 1059 - DNA, 22 bp, synthetic construct
  misc_feature 1..22: note = Synthetic oligonucleotide
  modified_base 6: mod_base = OTHER; note = uracil
  modified_base 8: mod_base = OTHER; note = uracil
  modified_base 18: mod_base = OTHER; note = uracil
  modified_base 22: mod_base = OTHER; note = uracil
  source 1..22: mol_type = other DNA
tgccctgtagaaaggcatgatt

SEQ ID NO: 1060 - DNA, 22 bp, synthetic construct
  misc_feature 1..22: note = Synthetic oligonucleotide
  modified_base 6: mod_base = OTHER; note = uracil
  modified_base 8: mod_base = OTHER; note = uracil
  modified_base 18: mod_base = OTHER; note = uracil
  modified_base 22: mod_base = OTHER; note = uracil
  source 1..22: mol_type = other DNA
tgccatgtagaaaggcatgatt

SEQ ID NO: 1061 - DNA, 22 bp, synthetic construct
  misc_feature 1..22: note = Synthetic oligonucleotide
  modified_base 8: mod_base = OTHER; note = uracil
  modified_base 18: mod_base = OTHER; note = uracil
  modified_base 22: mod_base = OTHER; note = uracil
  source 1..22: mol_type = other DNA
tgccacgtagaaaggcatgatt

SEQ ID NO: 1062 - DNA, 22 bp, synthetic construct
  misc_feature 1..22: note = Synthetic oligonucleotide
  modified_base 7..8: mod_base = OTHER; note = uracil
  modified_base 18: mod_base = OTHER; note = uracil
  modified_base 22: mod_base = OTHER; note = uracil
  source 1..22: mol_type = other DNA
tgccacttagaaaggcatgatt

SEQ ID NO: 1063 - DNA, 22 bp, synthetic construct
  misc_feature 1..22: note = Synthetic oligonucleotide
  modified_base 7: mod_base = OTHER; note = uracil
  modified_base 18: mod_base = OTHER; note = uracil
  modified_base 22: mod_base = OTHER; note = uracil
  source 1..22: mol_type = other DNA
tgccactgagaaaggcatgatt

SEQ ID NO: 1064 - DNA, 22 bp, synthetic construct
  misc_feature 1..22: note = Synthetic oligonucleotide
  modified_base 7: mod_base = OTHER; note = uracil
  modified_base 9: mod_base = OTHER; note = uracil
  modified_base 18: mod_base = OTHER; note = uracil
  modified_base 22: mod_base = OTHER; note = uracil
  source 1..22: mol_type = other DNA
tgccactgtgaaaggcatgatt

SEQ ID NO: 1065 - DNA, 22 bp, synthetic construct
  misc_feature 1..22: note = Synthetic oligonucleotide
  modified_base 7: mod_base = OTHER; note = uracil
  modified_base 9: mod_base = OTHER; note = uracil
  modified_base 18: mod_base = OTHER; note = uracil
  modified_base 22: mod_base = OTHER; note = uracil
  source 1..22: mol_type = other DNA
tgccactgtaaaaggcatgatt

SEQ ID NO: 1066 - DNA, 22 bp, synthetic construct
  misc_feature 1..22: note = Synthetic oligonucleotide
  modified_base 7: mod_base = OTHER; note = uracil
  modified_base 9: mod_base = OTHER; note = uracil
  modified_base 18: mod_base = OTHER; note = uracil
  modified_base 22: mod_base = OTHER; note = uracil
  source 1..22: mol_type = other DNA
tgccactgtagaaggcatgatt

SEQ ID NO: 1067 - DNA, 22 bp, synthetic construct
  misc_feature 1..22: note = Synthetic oligonucleotide
  modified_base 6: mod_base = OTHER; note = uracil
  modified_base 8: mod_base = OTHER; note = uracil
  modified_base 18: mod_base = OTHER; note = uracil
  modified_base 22: mod_base = OTHER; note = uracil
  source 1..22: mol_type = other DNA
gccactgtagaaaggcatgatt

SEQ ID NO: 1068 - DNA, 22 bp, synthetic construct
  misc_feature 1..22: note = Synthetic oligonucleotide
  modified_base 6: mod_base = OTHER; note = uracil
  modified_base 8: mod_base = OTHER; note = uracil
  modified_base 18: mod_base = OTHER; note = uracil
  modified_base 22: mod_base = OTHER; note = uracil
  source 1..22: mol_type = other DNA
tccactgtagaaaggcatgatt

SEQ ID NO: 1069 - DNA, 22 bp, synthetic construct
  misc_feature 1..22: note = Synthetic oligonucleotide
  modified_base 6: mod_base = OTHER; note = uracil
  modified_base 8: mod_base = OTHER; note = uracil
  modified_base 18: mod_base = OTHER; note = uracil
  modified_base 22: mod_base = OTHER; note = uracil
  source 1..22: mol_type = other DNA
tgcactgtagaaaggcatgatt

SEQ ID NO: 1070 - DNA, 22 bp, synthetic construct
  misc_feature 1..22: note = Synthetic oligonucleotide
  modified_base 6: mod_base = OTHER; note = uracil
  modified_base 8: mod_base = OTHER; note = uracil
  modified_base 18: mod_base = OTHER; note = uracil
  modified_base 22: mod_base = OTHER; note = uracil
  source 1..22: mol_type = other DNA
tgcactgtagaaaggcatgatt

SEQ ID NO: 1071 - DNA, 22 bp, synthetic construct
  misc_feature 1..22: note = Synthetic oligonucleotide
  modified_base 6: mod_base = OTHER; note = uracil
  modified_base 8: mod_base = OTHER; note = uracil
  modified_base 18: mod_base = OTHER; note = uracil
  modified_base 22: mod_base = OTHER; note = uracil
  source 1..22: mol_type = other DNA
tgccctgtagaaaggcatgatt

SEQ ID NO: 1072 - DNA, 22 bp, synthetic construct
  misc_feature 1..22: note = Synthetic oligonucleotide
  modified_base 6: mod_base = OTHER; note = uracil
  modified_base 8: mod_base = OTHER; note = uracil
  modified_base 18: mod_base = OTHER; note = uracil
  modified_base 22: mod_base = OTHER; note = uracil
  source 1..22: mol_type = other DNA
tgccatgtagaaaggcatgatt

SEQ ID NO: 1073 - DNA, 22 bp, synthetic construct
  misc_feature 1..22: note = Synthetic oligonucleotide
  modified_base 8: mod_base = OTHER; note = uracil
  modified_base 18: mod_base = OTHER; note = uracil
  modified_base 22: mod_base = OTHER; note = uracil
  source 1..22: mol_type = other DNA
tgccacgtagaaaggcatgatt

SEQ ID NO: 1074 - DNA, 22 bp, synthetic construct
  misc_feature 1..22: note = Synthetic oligonucleotide
  modified_base 7..8: mod_base = OTHER; note = uracil
  modified_base 18: mod_base = OTHER; note = uracil
  modified_base 22: mod_base = OTHER; note = uracil
  source 1..22: mol_type = other DNA
tgccacttagaaaggcatgatt

SEQ ID NO: 1075 - DNA, 22 bp, synthetic construct
  misc_feature 1..22: note = Synthetic oligonucleotide
  modified_base 7: mod_base = OTHER; note = uracil
  modified_base 18: mod_base = OTHER; note = uracil
  modified_base 22: mod_base = OTHER; note = uracil
  source 1..22: mol_type = other DNA
tgccactgagaaaggcatgatt

SEQ ID NO: 1076 - DNA, 22 bp, synthetic construct
  misc_feature 1..22: note = Synthetic oligonucleotide
  modified_base 7: mod_base = OTHER; note = uracil
  modified_base 9: mod_base = OTHER; note = uracil
  modified_base 18: mod_base = OTHER; note = uracil
  modified_base 22: mod_base = OTHER; note = uracil
  source 1..22: mol_type = other DNA
tgccactgtgaaaggcatgatt

SEQ ID NO: 1077 - DNA, 22 bp, synthetic construct
  misc_feature 1..22: note = Synthetic oligonucleotide
  modified_base 7: mod_base = OTHER; note = uracil
  modified_base 9: mod_base = OTHER; note = uracil
  modified_base 18: mod_base = OTHER; note = uracil
  modified_base 22: mod_base = OTHER; note = uracil
  source 1..22: mol_type = other DNA
tgccactgtaaaaggcatgatt

SEQ ID NO: 1078 - DNA, 22 bp, synthetic construct
  misc_feature 1..22: note = Synthetic oligonucleotide
  modified_base 7: mod_base = OTHER; note = uracil
  modified_base 9: mod_base = OTHER; note = uracil
  modified_base 18: mod_base = OTHER; note = uracil
  modified_base 22: mod_base = OTHER; note = uracil
  source 1..22: mol_type = other DNA
tgccactgtagaaggcatgatt

SEQ ID NO: 1079 - DNA, 23 bp, synthetic construct
  misc_feature 1..23: note = Synthetic oligonucleotide
  modified_base 7: mod_base = OTHER; note = uracil
  modified_base 9: mod_base = OTHER; note = uracil
  modified_base 19: mod_base = OTHER; note = uracil
  modified_base 23: mod_base = OTHER; note = uracil
  source 1..23: mol_type = other DNA
tgccactgtagaaaggcatgatt

SEQ ID NO: 1080 - DNA, 24 bp, synthetic construct
  misc_feature 1..24: note = Description of Artificial Sequence: Synthetic oligonucleotide
  source 1..24: mol_type = other DNA
cactgtagaaaggcatgaagcagg

SEQ ID NO: 1081 - DNA, 24 bp, synthetic construct
  misc_feature 1..24: note = Description of Artificial Sequence: Synthetic oligonucleotide
  source 1..24: mol_type = other DNA
cactgtagaaaggcatgaagcagg

SEQ ID NO: 1082 - DNA, 24 bp, synthetic construct
  misc_feature 1..24: note = Description of Artificial Sequence: Synthetic oligonucleotide
  source 1..24: mol_type = other DNA
cactgtagaaaggcatgaagcagg

SEQ ID NO: 1083 - DNA, 24 bp, synthetic construct
  misc_feature 1..24: note = Description of Artificial Sequence: Synthetic oligonucleotide
  source 1..24: mol_type = other DNA
cactgtagaaaggcatgaagcagg

SEQ ID NO: 1084 - DNA, 24 bp, synthetic construct
  misc_feature 1..24: note = Description of Artificial Sequence: Synthetic oligonucleotide
  source 1..24: mol_type = other DNA
cactgtagaaaggcatgaagcagg

SEQ ID NO: 1085 - DNA, 24 bp, synthetic construct
  misc_feature 1..24: note = Description of Artificial Sequence: Synthetic oligonucleotide
  source 1..24: mol_type = other DNA
cactgtagaaaggcatgaagcagg

SEQ ID NO: 1086 - DNA, 24 bp, synthetic construct
  misc_feature 1..24: note = Description of Artificial Sequence: Synthetic oligonucleotide
  source 1..24: mol_type = other DNA
cactgtagaaaggcatgaagcagg

SEQ ID NO: 1087 - DNA, 24 bp, synthetic construct
  misc_feature 1..24: note = Description of Artificial Sequence: Synthetic oligonucleotide
  source 1..24: mol_type = other DNA
cactgtagaaaggcatgaagcagg

SEQ ID NO: 1088 - DNA, 24 bp, synthetic construct
  misc_feature 1..24: note = Description of Artificial Sequence: Synthetic oligonucleotide
  source 1..24: mol_type = other DNA
cactgtagaaaggcatgaagcagg

SEQ ID NO: 1089 - DNA, 24 bp, synthetic construct
  misc_feature 1..24: note = Description of Artificial Sequence: Synthetic oligonucleotide
  source 1..24: mol_type = other DNA
cactgtagaaaggcatgaagcagg

SEQ ID NO: 1090 - DNA, 24 bp, synthetic construct
  misc_feature 1..24: note = Description of Artificial Sequence: Synthetic oligonucleotide
  source 1..24: mol_type = other DNA
cactgtagaaaggcatgaagcagg

SEQ ID NO: 1091 - DNA, 24 bp, synthetic construct
  misc_feature 1..24: note = Description of Artificial Sequence: Synthetic oligonucleotide
  source 1..24: mol_type = other DNA
cactgtagaaaggcatgaagcagg

SEQ ID NO: 1092 - DNA, 24 bp, synthetic construct
  misc_feature 1..24: note = Description of Artificial Sequence: Synthetic oligonucleotide
  source 1..24: mol_type = other DNA
cactgtagaaaggcatgaagcagg

SEQ ID NO: 1093 - DNA, 24 bp, synthetic construct
  misc_feature 1..24: note = Description of Artificial Sequence: Synthetic oligonucleotide
  source 1..24: mol_type = other DNA
cactgtagaaaggcatgaagcagg

SEQ ID NO: 1094 - DNA, 24 bp, synthetic construct
  misc_feature 1..24: note = Description of Artificial Sequence: Synthetic oligonucleotide
  source 1..24: mol_type = other DNA
cactgtagaaaggcatgaagcagg

SEQ ID NO: 1095 - DNA, 23 bp, synthetic construct
  misc_feature 1..23: note = Synthetic oligonucleotide
  modified_base 7: mod_base = OTHER; note = uracil
  modified_base 9: mod_base = OTHER; note = uracil
  modified_base 19: mod_base = OTHER; note = uracil
  modified_base 23: mod_base = OTHER; note = uracil
  source 1..23: mol_type = other DNA
tgccactgtagaaaggcatgatt

SEQ ID NO: 1096 - DNA, 23 bp, synthetic construct
  misc_feature 1..23: note = Synthetic oligonucleotide
  modified_base 7: mod_base = OTHER; note = uracil
  modified_base 9: mod_base = OTHER; note = uracil
  modified_base 19: mod_base = OTHER; note = uracil
  modified_base 23: mod_base = OTHER; note = uracil
  source 1..23: mol_type = other DNA
tgccactgtagaaaggcatgatt

SEQ ID NO: 1097 - DNA, 23 bp, synthetic construct
  misc_feature 1..23: note = Synthetic oligonucleotide
  modified_base 7: mod_base = OTHER; note = uracil
  modified_base 9: mod_base = OTHER; note = uracil
  modified_base 19: mod_base = OTHER; note = uracil
  modified_base 23: mod_base = OTHER; note = uracil
  source 1..23: mol_type = other DNA
tgccactgtagaaaggcatgatt

SEQ ID NO: 1098 - DNA, 23 bp, synthetic construct
  misc_feature 1..23: note = Synthetic oligonucleotide
  modified_base 7: mod_base = OTHER; note = uracil
  modified_base 9: mod_base = OTHER; note = uracil
  modified_base 19: mod_base = OTHER; note = uracil
  modified_base 23: mod_base = OTHER; note = uracil
  source 1..23: mol_type = other DNA
tgccactgtagaaaggcatgatt

SEQ ID NO: 1099 - DNA, 23 bp, synthetic construct
  misc_feature 1..23: note = Synthetic oligonucleotide
  modified_base 7: mod_base = OTHER; note = uracil
  modified_base 9: mod_base = OTHER; note = uracil
  modified_base 19: mod_base = OTHER; note = uracil
  modified_base 23: mod_base = OTHER; note = uracil
  source 1..23: mol_type = other DNA
tgccactgtagaaaggcatgatt

SEQ ID NO: 1100 - DNA, 23 bp, synthetic construct
  misc_feature 1..23: note = Synthetic oligonucleotide
  modified_base 7: mod_base = OTHER; note = uracil
  modified_base 9: mod_base = OTHER; note = uracil
  modified_base 19: mod_base = OTHER; note = uracil
  modified_base 23: mod_base = OTHER; note = uracil
  source 1..23: mol_type = other DNA
tgccactgtagaaaggcatgatt

SEQ ID NO: 1101 - DNA, 22 bp, synthetic construct
  misc_feature 1..22: note = Description of Artificial Sequence: Synthetic oligonucleotide
  source 1..22: mol_type = other DNA
actgtagaaaggcatgaagcag

SEQ ID NO: 1102 - DNA, 22 bp, synthetic construct
  misc_feature 1..22: note = Description of Artificial Sequence: Synthetic oligonucleotide
  source 1..22: mol_type = other DNA
actgtagaaaggcatgaagcag

SEQ ID NO: 1103 - DNA, 22 bp, synthetic construct
  misc_feature 1..22: note = Description of Artificial Sequence: Synthetic oligonucleotide
  source 1..22: mol_type = other DNA
actgtagaaaggcatgaagcag

SEQ ID NO: 1104 - DNA, 22 bp, synthetic construct
  misc_feature 1..22: note = Description of Artificial Sequence: Synthetic oligonucleotide
  source 1..22: mol_type = other DNA
actgtagaaaggcatgaagcag

SEQ ID NO: 1105 - DNA, 22 bp, synthetic construct
  misc_feature 1..22: note = Description of Artificial Sequence: Synthetic oligonucleotide
  source 1..22: mol_type = other DNA
actgtagaaaggcatgaagcag

SEQ ID NO: 1106 - DNA, 22 bp, synthetic construct
  misc_feature 1..22: note = Description of Artificial Sequence: Synthetic oligonucleotide
  source 1..22: mol_type = other DNA
actgtagaaaggcatgaagcag

SEQ ID NO: 1107 - DNA, 22 bp, synthetic construct
  misc_feature 1..22: note = Description of Artificial Sequence: Synthetic oligonucleotide
  source 1..22: mol_type = other DNA
actgtagaaaggcatgaagcag

SEQ ID NO: 1108 - DNA, 22 bp, synthetic construct
  misc_feature 1..22: note = Description of Artificial Sequence: Synthetic oligonucleotide
  source 1..22: mol_type = other DNA
actgtagaaaggcatgaagcag

SEQ ID NO: 1109 - DNA, 22 bp, synthetic construct
  misc_feature 1..22: note = Description of Artificial Sequence: Synthetic oligonucleotide
  source 1..22: mol_type = other DNA
actgtagaaaggcatgaagcag

SEQ ID NO: 1110 - DNA, 22 bp, synthetic construct
  misc_feature 1..22: note = Description of Artificial Sequence: Synthetic oligonucleotide
  source 1..22: mol_type = other DNA
actgtagaaaggcatgaagcag

SEQ ID NO: 1111 - DNA, 22 bp, synthetic construct
  misc_feature 1..22: note = Description of Artificial Sequence: Synthetic oligonucleotide
  source 1..22: mol_type = other DNA
actgtagaaaggcatgaagcag

SEQ ID NO: 1112 - DNA, 22 bp, synthetic construct
  misc_feature 1..22: note = Description of Artificial Sequence: Synthetic oligonucleotide
  source 1..22: mol_type = other DNA
actgtagaaaggcatgaagcag

SEQ ID NO: 1113 - DNA, 22 bp, synthetic construct
  misc_feature 1..22: note = Description of Artificial Sequence: Synthetic oligonucleotide
  source 1..22: mol_type = other DNA
actgtagaaaggcatgaagcag

SEQ ID NO: 1114 - DNA, 22 bp, synthetic construct
  misc_feature 1..22: note = Description of Artificial Sequence: Synthetic oligonucleotide
  source 1..22: mol_type = other DNA
actgtagaaaggcatgaagcag

SEQ ID NO: 1115 - DNA, 22 bp, synthetic construct
  misc_feature 1..22: note = Description of Artificial Sequence: Synthetic oligonucleotide
  source 1..22: mol_type = other DNA
actgtagaaaggcatgaagcag

SEQ ID NO: 1116 - DNA, 20 bp, synthetic construct
  misc_feature 1..20: note = Description of Artificial Sequence: Synthetic oligonucleotide
  source 1..20: mol_type = other DNA
ctgtagaaaggcatgaagca

SEQ ID NO: 1117 - DNA, 20 bp, synthetic construct
  misc_feature 1..20: note = Description of Artificial Sequence: Synthetic oligonucleotide
  source 1..20: mol_type = other DNA
ctgtagaaaggcatgaagca

SEQ ID NO: 1118 - DNA, 20 bp, synthetic construct
  misc_feature 1..20: note = Description of Artificial Sequence: Synthetic oligonucleotide
  source 1..20: mol_type = other DNA
ctgtagaaaggcatgaagca

SEQ ID NO: 1119 - RNA, 25 nt, synthetic construct
  misc_feature 1..25: note = Description of Artificial Sequence: Synthetic oligonucleotide
  source 1..25: mol_type = other RNA
gcttcatgcctttctacagtggcct

SEQ ID NO: 1120 - RNA, 25 nt, synthetic construct
  misc_feature 1..25: note = Description of Artificial Sequence: Synthetic oligonucleotide
  source 1..25: mol_type = other RNA
gcttcatccccttctacagtggcct

SEQ ID NO: 1121 - DNA, 23 bp, synthetic construct
  misc_feature 1..23: note = Synthetic oligonucleotide
  modified_base 7: mod_base = OTHER; note = uracil
  modified_base 9: mod_base = OTHER; note = uracil
  modified_base 19: mod_base = OTHER; note = uracil
  modified_base 23: mod_base = OTHER; note = uracil
  source 1..23: mol_type = other DNA
tgccactgtagaaaggcatgatt

SEQ ID NO: 1122 - DNA, 23 bp, synthetic construct
  misc_feature 1..23: note = Synthetic oligonucleotide
  modified_base 7: mod_base = OTHER; note = uracil
  modified_base 9: mod_base = OTHER; note = uracil
  modified_base 19: mod_base = OTHER; note = uracil
  modified_base 23: mod_base = OTHER; note = uracil
  source 1..23: mol_type = other DNA
tgccactgtagaaaggcatgatt

SEQ ID NO: 1123 - DNA, 21 bp, synthetic construct
  misc_feature 1..21: note = Synthetic oligonucleotide
  modified_base 7: mod_base = OTHER; note = uracil
  modified_base 9: mod_base = OTHER; note = uracil
  modified_base 19: mod_base = OTHER; note = uracil
  modified_base 21: mod_base = OTHER; note = uracil
  source 1..21: mol_type = other DNA
tgccactgtagaaaggcattt

SEQ ID NO: 1124 - DNA, 21 bp, synthetic construct
  misc_feature 1..21: note = Synthetic oligonucleotide
  modified_base 7: mod_base = OTHER; note = uracil
  modified_base 9: mod_base = OTHER; note = uracil
  modified_base 19: mod_base = OTHER; note = uracil
  modified_base 21: mod_base = OTHER; note = uracil
  source 1..21: mol_type = other DNA
tgccactgtagaaaggcattt

SEQ ID NO: 1125 - DNA, 21 bp, synthetic construct
  misc_feature 1..21: note = Synthetic oligonucleotide
  modified_base 7: mod_base = OTHER; note = uracil
  modified_base 9: mod_base = OTHER; note = uracil
  modified_base 19: mod_base = OTHER; note = uracil
  modified_base 21: mod_base = OTHER; note = uracil
  source 1..21: mol_type = other DNA
tgccactgtagaaaggcattt

SEQ ID NO: 1126 - DNA, 21 bp, synthetic construct
  misc_feature 1..21: note = Synthetic oligonucleotide
  modified_base 7: mod_base = OTHER; note = uracil
  modified_base 9: mod_base = OTHER; note = uracil
  modified_base 19: mod_base = OTHER; note = uracil
  modified_base 21: mod_base = OTHER; note = uracil
  source 1..21: mol_type = other DNA
tgccactgtagaaaggcattt

SEQ ID NO: 1127 - DNA, 21 bp, synthetic construct
  misc_feature 1..21: note = Synthetic oligonucleotide
  modified_base 7: mod_base = OTHER; note = uracil
  modified_base 9: mod_base = OTHER; note = uracil
  modified_base 19: mod_base = OTHER; note = uracil
  modified_base 21: mod_base = OTHER; note = uracil
  source 1..21: mol_type = other DNA
tgccactgtagaaaggcattt

SEQ ID NO: 1128 - DNA, 21 bp, synthetic construct
  misc_feature 1..21: note = Synthetic oligonucleotide
  modified_base 7: mod_base = OTHER; note = uracil
  modified_base 9: mod_base = OTHER; note = uracil
  modified_base 19: mod_base = OTHER; note = uracil
  modified_base 21: mod_base = OTHER; note = uracil
  source 1..21: mol_type = other DNA
tgccactgtagaaaggcattt

SEQ ID NO: 1129 - RNA, 25 nt, synthetic construct
  misc_feature 1..25: note = Description of Artificial Sequence: Synthetic oligonucleotide
  source 1..25: mol_type = other RNA
gctggcctcccaataaagctggaca

SEQ ID NO: 1130 - RNA, 25 nt, synthetic construct
  misc_feature 1..25: note = Description of Artificial Sequence: Synthetic oligonucleotide
  source 1..25: mol_type = other RNA
gctggcctcccaataaagctggaca

SEQ ID NO: 1131 - DNA, 20 bp, synthetic construct
  misc_feature 1..20: note = Description of Artificial Sequence: Synthetic oligonucleotide
  source 1..20: mol_type = other DNA
tggtaatccactttcagagg

SEQ ID NO: 1132 - DNA, 20 bp, synthetic construct
  misc_feature 1..20: note = Description of Artificial Sequence: Synthetic oligonucleotide
  source 1..20: mol_type = other DNA
tggtaatccactttcagagg

SEQ ID NO: 1133 - DNA, 20 bp, synthetic construct
  misc_feature 1..20: note = Description of Artificial Sequence: Synthetic oligonucleotide
  source 1..20: mol_type = other DNA
tggtaatccactttcagagg

SEQ ID NO: 1134 - DNA, 20 bp, synthetic construct
  misc_feature 1..20: note = Description of Artificial Sequence: Synthetic oligonucleotide
  source 1..20: mol_type = other DNA
tggtaatccactttcagagg

SEQ ID NO: 1135 - DNA, 20 bp, synthetic construct
  misc_feature 1..20: note = Description of Artificial Sequence: Synthetic oligonucleotide
  source 1..20: mol_type = other DNA
tggtaatccactttcagagg

SEQ ID NO: 1136 - DNA, 20 bp, synthetic construct
  misc_feature 1..20: note = Description of Artificial Sequence: Synthetic oligonucleotide
  source 1..20: mol_type = other DNA
agcttcttgtccagctttat

SEQ ID NO: 1137 - DNA, 20 bp, synthetic construct
  misc_feature 1..20: note = Description of Artificial Sequence: Synthetic oligonucleotide
  source 1..20: mol_type = other DNA
agcttcttgtccagctttat

SEQ ID NO: 1138 - DNA, 20 bp, synthetic construct
  misc_feature 1..20: note = Description of Artificial Sequence: Synthetic oligonucleotide
  source 1..20: mol_type = other DNA
agcttcttgtccagctttat

SEQ ID NO: 1139 - DNA, 20 bp, synthetic construct
  misc_feature 1..20: note = Description of Artificial Sequence: Synthetic oligonucleotide
  source 1..20: mol_type = other DNA
agcttcttgtccagctttat

SEQ ID NO: 1140 - DNA, 20 bp, synthetic construct
  misc_feature 1..20: note = Description of Artificial Sequence: Synthetic oligonucleotide
  source 1..20: mol_type = other DNA
agcttcttgtccagctttat

SEQ ID NO: 1141 - DNA, 20 bp, synthetic construct
  misc_feature 1..20: note = Description of Artificial Sequence: Synthetic oligonucleotide
  source 1..20: mol_type = other DNA
agcttcttgtccagctttat

SEQ ID NO: 1142 - DNA, 20 bp, synthetic construct
  misc_feature 1..20: note = Description of Artificial Sequence: Synthetic oligonucleotide
  source 1..20: mol_type = other DNA
agcttcttgtccagctttat
